(19) United States
(12) Patent Application Publication
(10) Pub. No.: US 2024/0065297 A1
(43) Pub. Date: Feb. 29, 2024

(54) FERMENTED BEVERAGE COMPOSITION

(71) Applicant: SOCIETE DES PRODUITS NESTLE S.A., Vevey (CH)

(72) Inventors: JIYUAN ZHANG, Lausanne (CH); CYRIL MOCCAND, Lully (CH); CATHERINE NGOM-BRU, Mezieres (CH); AXEL ANDRE, Chexbres (CH)

(21) Appl. No.: 18/002,750

(22) PCT Filed: Jun. 22, 2021
(86) PCT No.: PCT/EP2021/066903

§ 371 Date: Dec. 21, 2022

(30) Foreign Application Priority Data
Jun. 24, 2020 (EP) 20181980.2

(51) Int. Cl. A23L 2/38; A23L 2/385; A23L 2/52

(52) U.S. Cl. CPC A23L 2/382; A23L 2/385; A23L 2/52

(57) ABSTRACT

The present invention relates to a beverage composition comprising fermented cascara or fermented cascara extract. A further aspect of the invention is a method of preparing a beverage composition. A still further aspect of the invention is the yeast Pichia kluyveri NYSC 5485 (CNCM I-5525).

### CROSS REFERENCE TO RELATED APPLICATIONS

[0001] The present application is a National Stage of International Application No. PCT/EP2021/066903, filed on Jun. 22, 2021, which claims priority to European Patent Application No. 20181980.2, fled on Jun. 24, 2020, the entire contents of which are being incorporated herein by reference.

### SEQUENCE LISTING

[0002] The instant application contains a Sequence Listing which has been submitted electronically in ASCII format and is hereby incorporated by reference in its entirety. Said ASCII copy, created on Jul. 18, 2023, is named Sequence_Listing.txt and is 29,837.071 bytes in size.

### FIELD OF THE INVENTION

[0003] The present invention relates to a beverage composition comprising fermented cascara or fermented cascara extract. A further aspect of the invention is a method of preparing a beverage composition.

### BACKGROUND OF THE INVENTION

[0004] Fruitiness in low-alcohol beverages is sought after by consumers, but many people would prefer not to consume beverages with added flavouring, especially synthetic flavourings. The fruity perception in most low-alcohol beverages is often achieved by adding high-sugar containing fruit concentrates, resulting in higher sugar content which is not always desirable.

[0005] Cascara beverages are increasing popular. Cascara, which is the Spanish word for husk, is the outer part of the coffee cherry. The production of cascara beverages utilises this part of the coffee cherry that is often discarded. Typically the outer part of the coffee cherry is removed from the coffee bean and dried in the sun before being used to brew beverages in a similar fashion to tea. Cascara beverages have a subtle and often tart sweetness rather than bitter taste profile making it ideal for refreshing beverages. However, some consumers perceive a “stewed tea” flavour in cascara that they do not enjoy.

[0006] Any reference to prior art documents in this specification is not to be considered an admission that such prior art is widely known or forms part of the common general knowledge in the field. As used in this specification, the words “comprises”, “comprising”, and similar words, are not to be interpreted in an exclusive or exhaustive sense. In other words, they are intended to mean “including, but not limited to”.

### SUMMARY OF THE INVENTION

[0007] An object of the present invention is to improve the state of the art and to provide a new product to overcome at least some of the inconveniences described above, or at least to provide a useful alternative. The object of the present invention is achieved by the subject matter of the independent claims. The dependent claims further develop the idea of the present invention.

[0008] Accordingly, the present invention provides in a first aspect a beverage composition comprising fermented cascara or fermented cascara extract wherein the weight ratio of 2-phenylethyl acetate to benzaldehyde is greater than 1.

[0009] A second aspect of the invention provides a container for use in a beverage preparation device, the container containing the beverage composition of the invention.

[0010] A third aspect of the invention provides a starter culture comprising Pichia kluyveri NYSC 5485 (CNCM 1-5525).

[0011] In a fourth aspect, the invention provides a method of preparing a beverage composition comprising;
[0012] a. steeping cascara in water to form an aqueous cascara extract and steeped cascara; and
[0013] b. fermenting the aqueous cascara extract in the presence or absence of the steeped cascara;
[0014] wherein the fermentation is performed by yeast in the absence of acetic acid bacteria.

[0015] Surprisingly, the inventors found that by fermenting cascara with yeast they are able to provide an enhancement in the sensorial perception. In particular, the perception of floral and fruity notes were significantly improved, corresponding to increasing concentrations of floral and fruity-related volatiles. The levels of individual aroma compounds such as acetate esters gave a well-balanced aroma profile without an acetone-like off odor or vinegar/beer-like/winy fermented notes. By fermenting in the absence of acetic acid bacteria they avoided generating the acid “bite” present in traditional fermented drinks such as kombucha.

### BRIEF DESCRIPTION OF THE DRAWINGS

[0016] FIG. 1 shows sensory profiles of infusions of cascara from Brazil fermented with different yeasts. Left-hand column; Acid, Bitter. Sweet. Right-hand column; Fruity, Fermented, Floral. The samples are compared to the reference set as 0 and are “Control 24H”, treated as per the fermentation samples but with no yeast; “NYSC5485”, fermentation with Pichia kluyveri NYSC 5485; “NCYC246”, fermentation with P. kluyveri NCYC 246; and “S33”, fermentation with Saccharomyces cerevisiae S-33.

[0017] FIG. 2 shows sensory profiles of infusions of cascara from Mexico fermented with different yeasts. Left-hand column; Acid, Bitter, Sweet. Right-hand column; Fruity, Fermented, Floral. Fermentation samples labeled as for FIG. 1.

[0018] FIG. 3 shows (from top to bottom) the levels of 2-phenylethyl acetate, isopentyl acetate and isobutyl acetate in parts per million of infusions of cascara from Mexico after fermentation with different yeasts. Fermentation samples labeled as for FIG. 1.

### DETAILED DESCRIPTION OF THE INVENTION

[0019] Consequently the present invention relates in part to a beverage composition comprising (for example consisting of) fermented cascara or fermented cascara extract wherein the weight ratio of 2-phenylethyl acetate to benzaldehyde is greater than 1. For example the weight ratio of 2-phenylethyl acetate to benzaldehyde may be greater than 1.5, 3, 6, 10, 15, 20, 25, 30, 40 or 50. For example the weight ratio of 2-phenylethyl acetate to benzaldehyde may be from 1 to 500, for example from 5 to 400, for example from 10 to 200, for example from 20 to 100, for example from 20 to 50, for further example from 22 to 40. In an aspect of the invention, the weight ratio of 2-phenylethyl acetate to benzaldehyde is greater than 0.8, for example greater than 0.9. In an aspect of the invention the weight ratio of 2-phenylethyl acetate to benzaldehyde is from 0.8 to 500, for example from 0.9 to 100.

[0020] 2-phenylethyl acetate has an attractive, floral, rose-like aroma. Increased concentrations of 2-phenylethyl acetate correspond to enhanced floral notes. Benzaldehyde provides a useful denominator for a ratio with 2-phenylethyl acetate as it is naturally present in cascara but is not greatly influenced by fermentation.

[0021] In the context of the present invention, cascara is the outer part of the coffee cherry. It is distinct from cascara sagrada, the bark of Rhamnus purshiana. The coffee cherry is the fruit of the Coffea plant, a member of the Rubiaceae family. Coffee cherries are sometimes referred to as coffee berries. The coffee cherries may be the fruit of Arabica (Coffea arabica). Robusta (Coffea canephora) or mixtures of these.

[0022] Two types of cascara are available depending on the processing method. Husk cascara is produced by drying whole coffee cherries and then dehulling them. For example the husk cascara according to the invention may be produced from sun dried coffee cherries. The husk cascara comprises the outer skin, pulp, mucilage and parchment of the coffee cherry. Pulp cascara is produced by washing coffee cherries and de-pulping them, usually in the wash water. The separated pulp is then dried. For example the pulp cascara according to the invention may be sun dried. Pulp cascara comprises the outer skin and the pulp of the coffee cherry. The cascara according to the invention may be selected from the group consisting of husk cascara, pulp cascara and combinations of these. The cascara according to the invention may be pulp cascara.

[0023] To optimize the flavour of the cascara it should ideally be produced from ripe coffee cherries. It is difficult to avoid some unripe coffee cherries being included in the harvest but, for example, the cascara according to the invention may be produced from predominantly ripe coffee cherries. For example, at least 80% of the coffee cherries used to produce the cascara may be red in colour, for example at least 90%.

[0024] In the context of the present invention the term “fermentation” refers to a process in which the activity of microorganisms brings about a change (typically a desirable change) to a foodstuff or beverage. The fermentation may be with yeasts and/or bacteria. The fermentation may be anaerobic or aerobic. Fermentation is one of the oldest means of preserving and enhancing foods.

[0025] The term “fermented cascara” refers to cascara which has been subjected to a process in which the activity of microorganisms such as yeasts brings about a chemical change in the organic components of the cascara, typically a desirable change. The fermented cascara may have been fermented in an aqueous medium, for example with yeast. The fermented cascara may be a dried cascara which had been added to an aqueous fermentation medium and fermented before being separated from the aqueous fermentation medium and dried. The fermented cascara may have been fermented in a “solid-state” fermentation, for example adding a starter culture of yeast to coffee cherry pulp.

[0026] The term “cascara extract” refers to material extracted from cascara, for example an aqueous extract of cascara. The term “fermented cascara extract” refers to an extract of cascara where the cascara extract has been fermented, for example an aqueous cascara extract where the aqueous extract has been fermented, such as by yeast. The fermented cascara extract may be a dried fermented cascara extract.

[0027] Benzaldehyde, a commonly found organic compound in natural sources, with a characteristic almond-like odour and medium odour threshold. Naturally present in cascara, green and roasted coffee beans, benzaldehyde is not considered as key coffee odorant due to its relatively low concentration.

[0028] Isopentyl acetate, also known as isoamyl acetate, naturally occurs in bananas. At appropriate concentrations is provides a pleasant fruity note, resembling bananas and pears. In an embodiment the weight ratio of isopentyl acetate to benzaldehyde is greater than 1. For example the weight ratio of isopentyl acetate to benzaldehyde may be greater than 1.5, 3, 6, 10, 15, 20, 25, 30, 40, 50, 60 or 70. In an embodiment, the weight ratio of isopentyl acetate to benzaldehyde may be from 1 to 500, for example from 5 to 400, for example from 10 to 200, for example from 20 to 100, for example from 50 to 300, for further example from 40 to 200.

[0029] Isobutyl acetate provides a pleasant fruity note. In an embodiment the weight ratio of isobutyl acetate to benzaldehyde is greater than 0.5. For example the weight ratio of isobutyl acetate to benzaldehyde may be greater than 1, 2, 3 or 4. The weight ratio of isobutyl acetate to benzaldehyde may be from 0.5 to 20, for example from 1 to 15, for example from 2 to 10 for further example from 3 to 6. 3-Methylbutanol is a common volatile produced through fermentation, and provides mainly pungent and alcoholic notes. Therefore, maximizing the ratio of isopentyl acetate to 3-methlybutanol would result in a beverage with higher level of fruitiness with minimal fermented notes. In an embodiment the weight ratio of isopentyl acetate to 3-methylbutanol is greater than 0.5. For example the weight ratio of isopentyl acetate to 3-methylbutanol may be greater than 1, 2, 3 or 4. The weight ratio of isopentyl acetate to 3-methylbutanol may be from 0.5 to 40, for example from 1 to 30, for example from 2 to 20, for example from 3 to 15, for further example from 3 to 4.

[0030] Both isopentyl acetate and hexyl acetate provide fruity notes, although isopentyl acetate has much higher odour strength than hexyl acetate. Therefore, a high ratio of isopentyl acetate to hexyl acetate indicates the intensity of fruitiness in the beverages. In an embodiment the weight ratio of isopentyl acetate to hexyl acetate is greater than 10. For example the weight ratio of isopentyl acetate to hexyl acetate may be greater than 100 or greater than 500. The weight ratio of isopentyl acetate to hexyl acetate may be from 100 to 1000. The weight ratio of isopentyl acetate to hexyl acetate may be from 200 to 3000, for example from 250 to 2000, for further example from 500 to 1500. In an embodiment, the level of hexyl acetate in the beverage composition is less than 0.1 ppm.

[0031] In an embodiment the weight ratio of 2-phenylethanol to benzaldehyde is greater than 2.7 (for example greater than 2.8, 2.9, 3.0). In an embodiment the weight ratio of ethanol to benzaldehyde is less than 50000 (for example less than 40000, for further example less than 30000). In an embodiment the weight ratio of 2-phenylethanol to benzaldehyde is greater than 2.7 (for example greater than 2.8, 2.9, 3.0) and the weight ratio of ethanol to benzaldehyde is less than 50000 (for example less than 40000, for further example less than 30000).

[0032] In an embodiment the weight ratio of ethyl acetate to benzaldehyde is greater than 50. For example the weight ratio of ethyl acetate to benzaldehyde may be greater than 100 or greater than 500. The weight ratio of ethyl acetate to benzaldehyde may be from 50 to 2000. The weight ratio of ethyl acetate to benzaldehyde may be from 300 to 1500, for example from 500 to 1100. An appropriate ratio of ethyl acetate to benzaldehyde is associated with a fruity aroma. Too high levels of ethyl acetate may result in an unpleasant ethereal aroma. In an embodiment, the beverage composition is selected from the group consisting of a ready to drink beverage, a beverage concentrate, a soluble beverage powder, dried aromatic plant material and combinations of these. In an embodiment, the beverage composition is a beverage extractable composition for the preparation of a beverage. Beverage extractable compositions for the preparation of a beverage include compositions which dissolve completely such as soluble beverage powders as well as compositions which combine extractable and insoluble components such as dried cascara. The beverage composition may comprise added vitamins. The beverage composition may comprise added antioxidants. The beverage composition may comprise added flavours. However, fermentation according to the invention generates attractive fruity aromas and so added flavours may not be required. In an embodiment the beverage composition does not comprise added flavours. The beverage composition may consist of coffee bean and cascara components. The beverage composition may consist of cascara components. The beverage composition may be free from coffee bean components, for example free from roast and ground coffee beans or free from extracts of roast and ground coffee beans.

[0033] In an embodiment the beverage composition is a mixture of dried fermented cascara extract and roast and ground coffee, for example to be brewed with water to form a beverage. In an embodiment the beverage composition is a mixture of dried fermented cascara extract, dried fermented cascara and roast and ground coffee, for example to be brewed with water to form a beverage.

[0034] The ready to drink beverage may be a fermented cascara infusion or a water flavoured with fermented cascara. The ready to drink beverage may additionally comprise other components such as flavourings or stabilizers. The ready to drink beverage may be carbonated. The ready to drink beverage may additionally comprise coffee (for example cold-brew coffee), tea (for example an aqueous extract of the leaves, leaf-buds, twigs or stems of the plant Camellia sinensis.

[0035] The dried aromatic plant material may be selected from the group consisting of cascara, roast and ground coffee, dried tea (e.g. dried leaves, leaf-buds, twigs or stems of the plant Camellia sinensis, dried herbal tea (e.g. dried flowers, fruit, leaves, seeds or roots of plants other than Camellia sinensis) and combinations of these. In an embodiment the beverage composition is a mixture of dried fermented cascara and roast and ground coffee, for example to be brewed with water to form a beverage.

[0036] Beverage preparation devices (for example beverage preparation machines) which accommodate extractable portioned ingredients provide a convenient method of preparing beverages. Such portioned ingredients are generally packed in a container, configured for example as a pod, pad, sachet, pouch, capsule or the like. An aspect of the invention provides a container for use in a beverage preparation device, the container containing the beverage composition of the invention. The container being for the preparation of a beverage when inserted into a beverage preparation device. The container may for example be a beverage capsule, among other configurations. In an embodiment, the container contains the beverage composition of the invention. For example the container may contain dried fermented cascara; dried fermented cascara extract; a mixture of dried fermented cascara and roast and ground coffee; a mixture of dried fermented cascara extract and roast and ground coffee; or a mixture of dried fermented cascara extract, dried fermented cascara and roast and ground coffee.

[0037] In an embodiment, the beverage composition has an ethanol content below 1.2 wt %, for example below 0.5 wt %, for example below 0.2 wt %, for further example below 0.05 wt %.

[0038] An aspect of the invention provides a method of preparing a beverage composition comprising;
[0039] a. steeping cascara in water to form an aqueous cascara extract and steeped cascara; and
[0040] b. fermenting the aqueous cascara extract in the presence or absence of the steeped cascara;
[0041] wherein the fermentation is performed by yeast in the absence of acetic acid bacteria.

[0042] The beverage composition prepared by the method of the invention may be a cascara beverage, for example a beverage comprising fermented cascara or fermented cascara extract. The beverage composition prepared by the method of the invention may have an ethanol content below 1.2 wt %, for example below 0.5 wt %, for example below 0.2 wt %, for further example below 0.05 wt %. In an embodiment, the beverage composition prepared by the method of the invention is the beverage composition of the invention.

[0043] The term steeping refers to immersing and soaking a material in liquid. The cascara may be steeped in water for at least 5 minutes, for example at least 10 minutes, for example at least 30 minutes, for example at least 60 minutes, for further example at least 120 minutes. During the steeping process, components of the cascara are extracted into the water. The steeping may be performed at a temperature between 4° C. and 98° C., for example between 20° C. and 95° C., for example between 60° C. and 95° C. Although cascara contains fermentable sugar, further fermentable sugar may be added to the aqueous cascara extract, for example sucrose or glucose. The fermentable sugar may be fructose or glucose. For example fermentable sugar may be added to the aqueous cascara extract at a level of between 2 and 10 wt. %, for example between 3 and 7 wt. %. The cascara may be ground before steeping.

[0044] When fermentation is to be performed in the absence of the steeped cascara, the cascara may for example be steeped in water using a continuous counter-current extraction system. A further option is to steep the cascara in water using a batch process, with the steeped cascara being separated from the aqueous cascara extract using a filter system. The ratio of cascara on a dry basis to water during steeping may be between 1:1 and 1:100 by weight, for example between 1:2 and 1:95 by weight, for example between 1:10 and 1:90 by weight, for example between 1:30 and 1:70 by weight, for further example between 1.3 and 1:6.

[0045] After steeping, the temperature of the aqueous cascara extract is adjusted to a temperature suitable for yeast growth, for example between 20° C. and 37° C., for example between 25° C. and 35° C., for example between 28° C. and 32° C. The temperature may for example be adjusted using a laminar flow heat exchanger. Yeast is added to the aqueous cascara extract to commence fermentation. Fermenting the aqueous cascara extract may be performed at a temperature between 25° C. and 35° C., for example between 28° C. and 32° C. Fermenting the aqueous cascara extract may be performed for at least 2 hours, for example at least 6 hours, for example at least 12 hours, for example at least 24 hours, for further example at least 48 hours.

[0046] The fermentation may be performed at a pH between 3 and 8, for example between 4 and 6.

[0047] The fermentation may be performed in the presence of a nitrogen source such as yeast extract or yeast peptone. The fermentation may be performed in the presence of added amino acids such as valine, leucine, isoleucine and/or phenylalanine, for example at a level of between 0.05 wt. % and 0.1 wt. % of the aqueous cascara extract.

[0048] The fermentation may be performed in anaerobic, microaerobic or aerobic conditions. For example, the partial oxygen pressure in the fermenter may be from 0 to 30%, for example from 1 to 20%, for further example from 2 to 10%.

[0049] Preferably the cascara has not been subjected to chemical processing such as hydrolysis before fermentation.

[0050] The fermentation may be performed by adding one or more yeasts at an initial combined yeast level of at least 10³ CFU/g, for example at least 10⁴ CFU/g, for example at least 10⁵ CFU/g, for example at least 10⁶ CFU/g, for further example at least 10⁷ CFU/g.

[0051] The fermentation is performed in the absence of acetic acid bacteria to avoid generating an acid “bite” in the flavour profile. In an embodiment the fermentation is performed in the absence of lactic acid bacteria.

[0052] In an embodiment the fermentation is performed in the absence of Saccharomyces subspecies. For example the fermentation may be performed in the absence of Saccharomyces cerevisiae. S. cerevisiae is used for winemaking and beer brewing. In addition to generating alcohol which may not be desired, S. cerevisiae generates a “fermented”, winey, yeasty flavour note rather than a fresh fruity note.

[0053] In an embodiment the fermentation is performed in the absence of a yeast selected from the group consisting of Zygosaccharomyces bailiff, Schizosaccharvmyces pombe, Torulaspora delbreuckii, Rhodotorula mucilaginosa, Brettanomyces bruxellensis and Candida stellate. These yeasts are commonly found in kombucha “tea-fungus” cultures.

[0054] Surprisingly, the inventors found that fermentation of cascara with Pichia kluyveri gave particularly good results. A beverage composition comprising cascara or cascara extract fermented with Pichia kluyveri had a pleasant fruity and floral flavour. Pichia kluyveri occurs naturally around the world, for example on olives, grapes and coffee. In an embodiment of the method of the invention, the yeast comprises Pichia kluyveri. For example, more than 50% of the yeast colony forming units present during fermentation may be Pichia kluyveri. For example, more than 50% of the micro-organism colony forming units present during fermentation may be Pichia kluyveri. For example, essentially all the yeast colony forming units present during fermentation may be Pichia kluyveri, For further example, essentially all the micro-organism colony forming units present during fermentation may be Pichia kluyveri.

[0055] Pichia kluyveri NCYC 246 (alternatively designated CBS 188) is the type-strain of Pichia kluyveri. It is publicly available, for example from the National Collection of Yeast Cultures, Quadram Institute Bioscience, Norwich, UK.

[0056] In an embodiment the yeast is Pichia kluyveri NCYC 246. For example more than 50% of the yeast colony forming units present during fermentation may be Pichia kluyveri NCYC 246. For example, more than 50% of the micro-organism colony forming units present during fermentation may be Pichia kluyveri NCYC 246. For example, essentially all the yeast colony forming units present during fermentation may be Pichia kluyveri NCYC 246. For further example, essentially all the micro-organism colony forming units present during fermentation may be Pichia kluyveri NCYC 246.

[0057] The inventors have found that especially good results were obtained by fermenting cascara with Pichia kluyveri NYSC 5485. Pichia kluyveri NYSC 5485 not only provides strong fruity and floral sensory characteristics but also reduces bitterness. In particular, the bitter “stewed-tea” note of cascara was reduced.

[0058] Pichia kluyveri is widely distributed in nature, for example being found on fruits such as coffee cherries and olives. Pichia kluyveri NYSC 5485, collected and isolated from a coffee fermentation in Nicaragua, was deposited with the Collection Nationale de Cultures de Microorganismes (CNCM), Institut Pasteur, 25 rue du Docteur Roux, F-75724 PARIS Cedex 15, France, on 23 Jun. 2020 and given the deposit number CNCM 1-5525.

[0059] In an embodiment, the yeast is Pichia kluyveri NYSC 5485 (CNCM 1-5525). For example more than 50% of the yeast colony forming units present during fermentation may be Pichia kluyveri NYSC 5485 (CNCM 1-5525). For example, more than 50% of the micro-organism colony forming units present during fermentation may be Pichia kluyveri NYSC 5485 (CNCM 1-5525). For example, essentially all the yeast colony forming units present during fermentation may be Pichia kluyveri NYSC 5485 (CNCM 1-5525), For further example, essentially all the micro-organism colony forming units present during fermentation may be Pichia kluyveri NYSC 5485 (CNCM 1-5525).

[0060] An aspect of the invention is Pichia kluyveri NYSC 5485 (CNCM 1-5525). An aspect of the invention is a yeast comprising a genetic sequence having at least 95% identity (for example at least 98% or 99% identity) to SEQ ID NO:1, a genetic sequence having at least 95% identity (for example at least 98% or 99% identity) to SEQ ID NO:2, a genetic sequence having at least 95% identity (for example at least 98% or 99% identity) to SEQ ID NO:3, a genetic sequence having at least 95% identity (for example at least 98% or 99% or 99.5% identity) to SEQ ID NO:4, a genetic sequence having at least 95% identity (for example at least 98% or 99% identity) to SEQ ID NO:5, a genetic sequence having at least 95% identity (for example at least 98% or 99% identity) to SEQ ID NO:6, a genetic sequence having at least 95% identity (for example at least 98% or 99% identity) to SEQ ID NO:7, a genetic sequence having at least 95% identity (for example at least 98% or 99% identity) to SEQ ID NO:8, a genetic sequence having at least 95% identity (for example at least 98% or 99% identity) to SEQ ID NO:9, a genetic sequence having at least 95% identity (for example at least 98% or 99% identity) to SEQ ID NO:10, a genetic sequence having at least 95% identity (for example at least 98% or 99% identity) to SEQ ID NO:11, and a genetic sequence having at least 95% identity (for example at least 98% or 99% identity) to SEQ ID NO:12.

[0061] An aspect of the invention provides a starter culture comprising Pichia kluyveri NYSC 5485 (CNCM 1-5525). The starter culture may comprise at least 10³ CFU/g of Pichia kluyveri NYSC 5485 (CNCM 1-5525), for example at least 10⁴ CFU/g of Pichia kluyveri NYSC 5485 (CNCM 1-5525), for example at least 10⁵ CFU/g of Pichia kluyveri NYSC 5485 (CNCM 1-5525), for example at least 10⁶ CFU/g of Pichia kluyveri NYSC 5485 (CNCM 1-5525), for example at least 10⁷ CFU/g of Pichia kluyveri NYSC 5485 (CNCM 1-5525), for example at least 10⁸ CFU/g of Pichia kluyveri NYSC 5485 (CNCM 1-5525), for further example at least 10⁹ CFU/g of Pichia kluyveri NYSC 5485 (CNCM 1-5525). The starter culture may be obtained by drying a concentrated yeast culture, for example spray drying the concentrated yeast culture together with maltodextrin. The starter culture may be stored frozen before being unfrozen and multiplied for use, for example the starter culture may be frozen at −80° C. in a vial with glycerol. The term “starter culture” refers to a composition comprising live microorganisms that are capable of initiating or effecting fermentation of organic material, optionally after being cultivated in a separate starter medium for obtaining a high-density culture. Accordingly, in an embodiment, a starter culture of the invention may be a high-density culture obtained by propagating a starter culture in a suitable medium. A starter culture according to the present invention may also contain, in addition to microorganisms, buffering agents and growth stimulating nutrients or preservatives or other carriers.

[0062] The genetic sequence of Pichia kluyveri NYSC 5485 (CNCM 1-5525) was analysed using PacBio sequencing technology. DNA purification was performed using a Qiagen Gentra Puregene Yeast kit. Twelve DNA fragments were identified. These may be individual chromosomes; 11 chromosomes and 1 mitochondrion DNA (SEQ ID NO:4). The genetic sequences are filed in electronic form as SEQ ID NO:1-SEQ ID NO:12. In an embodiment of the method of the invention, the yeast comprises a genetic sequence having at least 95% identity (for example at least 98% or 99% identity) to SEQ ID NO:1, SEQ ID NO:2, SEQ ID NO:3, SEQ ID NO:5, SEQ ID NO:6, SEQ ID NO:7, SEQ ID NO:8, SEQ ID NO:9, SEQ ID NO:10, SEQ ID NO:11 or SEQ ID NO:12. For example the yeast may comprise a genetic sequence having at least 95% identity (for example at least 98% or 99% identity) to a sequence selected from the group consisting of SEQ ID NO:1, SEQ ID NO:2, SEQ ID NO:3, SEQ ID NO:5, SEQ ID NO:6, SEQ ID NO:7, SEQ ID NO:8, SEQ ID NO:9, SEQ ID NO:10, SEQ ID NO:11 and SEQ ID NO:12.

[0063] In an embodiment of the method of the invention, the yeast comprises a genetic sequence having at least 95% identity (for example at least 98% or 99% identity) to SEQ ID NO:1, a genetic sequence having at least 95% identity (for example at least 98% or 99% identity) to SEQ ID NO:2, a genetic sequence having at least 95% identity (for example at least 98% or 99% identity) to SEQ ID NO:3, a genetic sequence having at least 95% identity (for example at least 98% or 99% identity) to SEQ ID NO:4, a genetic sequence having at least 95% identity (for example at least 98% or 99% identity) to SEQ ID NO:5, a genetic sequence having at least 95% identity (for example at least 98% or 99% identity) to SEQ ID NO:6, a genetic sequence having at least 95% identity (for example at least 98% or 99% identity) to SEQ ID NO:7, a genetic sequence having at least 95% identity (for example at least 98% or 99% identity) to SEQ ID NO:8, a genetic sequence having at least 95% identity (for example at least 98% or 99% identity) to SEQ ID NO:9, a genetic sequence having at least 95% identity (for example at least 98% or 99% identity) to SEQ ID NO:10, a genetic sequence having at least 95% identity (for example at least 98% or 99% identity) to SEQ ID NO:11 and a genetic sequence having at least 95% identity (for example at least 98% or 99% identity) to SEQ ID NO:12.

[0064] An aspect of the invention provides a method of preparing a beverage composition comprising; a) steeping cascara in water to form an aqueous cascara extract and steeped cascara; and b) fermenting the aqueous cascara extract in the presence or absence of the steeped cascara; wherein the fermentation is performed by a yeast comprising a genetic sequence having a global nucleotide identity at least 98% (for example at least 99%) to the combination of SEQ ID NOs:1-12. By the term “combination of SEQ ID NOs:1-12” it is meant that the sequence identity comparison is performed against all the individual DNA fragments as if concatenated into a single sequence.

[0065] An embodiment of the invention provides a method of preparing a beverage composition comprising; a) steeping cascara in water to form an aqueous cascara extract and steeped cascara; and b) fermenting the aqueous cascara extract in the presence or absence of the steeped cascara; wherein the fermentation is performed by yeast comprising a genetic sequence having at least 95% identity (for example at least 98% or 99% identity) to SEQ ID NO:1, a genetic sequence having at least 95% identity (for example at least 98% or 99% identity) to SEQ ID NO:2, a genetic sequence having at least 95% identity (for example at least 98% or 99% identity) to SEQ ID NO:3, a genetic sequence having at least 95% identity (for example at least 98% or 99% or 99.5% identity) to SEQ ID NO:4, a genetic sequence having at least 95% identity (for example at least 98% or 99% identity) to SEQ ID NO:5, a genetic sequence having at least 95% identity (for example at least 98% or 99% identity) to SEQ ID NO:6, a genetic sequence having at least 95% identity (for example at least 98% or 99% identity) to SEQ ID NO:7, a genetic sequence having at least 95% identity (for example at least 98% or 99% identity) to SEQ ID NO:8, a genetic sequence having at least 95% identity (for example at least 98% or 99% identity) to SEQ ID NO:9, a genetic sequence having at least 95% identity (for example at least 98% or 99% identity) to SEQ ID NO:10, a genetic sequence having at least 95% identity (for example at least 98% or 99% identity) to SEQ ID NO:11 and a genetic sequence having at least 95% identity (for example at least 98% or 99% identity) to SEQ ID NO:12.

[0066] In an embodiment, the yeast comprises a genetic sequence having a global nucleotide identity at least 98% (for example at least 99%) to the combination of SEQ ID NOs:1-12.

[0067] In an embodiment the yeast comprises a genetic sequence having at least 98% identity to SEQ ID NO:1, a genetic sequence having at least 98% identity to SEQ ID NO:2, a genetic sequence having at least 98% identity to SEQ ID NO:3, a genetic sequence having at least 99% identity to SEQ ID NO:5, a genetic sequence having at least 98% identity to SEQ ID NO:6, a genetic sequence having at least 99% identity to SEQ ID NO:7, a genetic sequence having at least 98% identity to SEQ ID NO:8, a genetic sequence having at least 98% identity to SEQ ID NO:9, a genetic sequence having at least 99% identity to SEQ ID NO:10, a genetic sequence having at least 98% identity to SEQ ID NO:11 and a genetic sequence having at least 98% identity to SEQ ID NO:12.

[0068] In an embodiment the yeast comprises a genetic sequence having at least 98% (for example at least 99%) identity to SEQ ID NO:1. In an embodiment the yeast comprises a genetic sequence having at least 98% (for example at least 99%) identity to SEQ ID NO:2. In an embodiment the yeast comprises a genetic sequence having at least 98% (for example at least 99%) identity to SEQ ID NO:3. In an embodiment the yeast comprises a genetic sequence having at least 99% identity to SEQ ID NO:5. In an embodiment the yeast comprises a genetic sequence having at least 98% (for example at least 99%) identity to SEQ ID NO:6. In an embodiment the yeast comprises a genetic sequence having at least 99% identity to SEQ ID NO:7. In an embodiment the yeast comprises a genetic sequence having at least 98% (for example at least 99%) identity to SEQ ID NO:8. In an embodiment the yeast comprises a genetic sequence having at least 98% (for example at least 99%) identity to SEQ ID NO:9. In an embodiment the yeast comprises a genetic sequence having at least 99% identity to SEQ ID NO:10. In an embodiment the yeast comprises a genetic sequence having at least 98% (for example at least 99%) identity to SEQ ID NO:11. In an embodiment the yeast comprises a genetic sequence having at least 98% (for example at least 99%) identity to SEQ ID NO:12.

[0069] In an embodiment, the aqueous cascara extract is separated from the steeped cascara after fermentation. For example the steeped cascara may be separated from the aqueous cascara extract using a filter system. After fermentation, the aqueous cascara extract becomes fermented cascara extract.

[0070] The fermented cascara extract may be packaged as a ready-to-drink beverage, for example packaged in a bottle or a can. Additional ingredients such as flavours and preservatives may be added to the fermented cascara extract before it is packaged as a ready-to-drink beverage. The fermented cascara extract may be heat-treated to deactivate or kill the yeast and any spoilage organisms before being packaged. The fermented cascara extract may be passed through a filter to remove the yeast and any spoilage organisms before being packaged.

[0071] In an embodiment the aqueous cascara extract is concentrated after being fermented. After fermentation the aqueous cascara extract may be concentrated to form a liquid concentrate, for example to be packaged and sold as such, or as an intermediate product for the manufacture of ready-to-drink products, for example in a different location. The aqueous cascara extract after fermentation (for example the fermented cascara extract) may be concentrated to form a powder, such as a soluble beverage powder. For example, the aqueous cascara extract after fermentation (the fermented cascara extract) may be dried by spray drying or freeze drying to form a soluble beverage powder. For example, the aqueous cascara extract after fermentation may be spray dried together with a carrier such as maltodextrin to form a soluble beverage powder. The soluble beverage powder may be packaged and sold as such, or it may be used as an intermediate product for the manufacture of ready-to-drink products, for example in a different location. The soluble beverage powder may be filled into a container for use in a beverage preparation device. The soluble beverage powder may be combined with other ingredients, for example dry ingredients such as tea, soluble coffee or roast and ground coffee. For example, the soluble beverage powder may be combined with roast and ground coffee and filled into a container for use in a beverage preparation device. The soluble beverage powder may be combined with milk powder or beverage creamer powder and optionally sugar to form a beverage mix. After fermenting the aqueous cascara extract in the presence of the steeped cascara, the steeped cascara becomes fermented cascara. In an embodiment, the steeped cascara, present during the fermentation of the aqueous cascara extract, is separated from the aqueous cascara extract after fermentation and then dried, for example using a rotary drier. The dried steeped cascara may be filled into a container for use in a beverage preparation device, or filled into a permeable bag such as a “tea-bag”. The dried steeped cascara may be combined with other dry ingredients such as tea, soluble coffee or roast and ground coffee.

[0072] In an embodiment, the steeped cascara, present during the fermentation of the aqueous cascara extract, is dried together with the aqueous cascara extract after fermentation, for example by freeze drying or spray drying. The dried steeped cascara (e.g. dried fermented cascara) together with dried aqueous cascara extract after fermentation (e.g. dried fermented cascara extract) may be filled into a container for use in a beverage preparation device, or filled into a permeable bag such as a “tea-bag”. The dried steeped cascara and dried aqueous cascara extract after fermentation may be combined with other dry ingredients such as tea, soluble coffee or roast and ground coffee.

[0073] The fermented cascara may be obtained in a “solid-state” fermentation, for example adding a starter culture of yeast to coffee cherry pulp. The term “solid-state” fermentation refers to fermentation taking place on solid materials. There is liquid water present in a solid-state fermentation, but the term is used in contrast to a liquid fermentation such as may occur in aqueous solution in a fermentation vessel.

[0074] An aspect of the invention provides a method of preparing a beverage composition comprising;
[0075] adding a starter culture of yeast to coffee cherry pulp, wherein the starter culture provides at least 10⁴ CFU (for example at least 10⁵ CFU, for further example at least 10⁶ CFU) of yeast per gram of coffee cherry pulp;
[0076] fermenting the coffee cherry pulp;
[0077] drying the fermented coffee cherry pulp to form fermented cascara; and either-extracting the fermented cascara with water to form a ready-to-drink beverage, or filling the fermented cascara into a container, the container being for the preparation of a beverage when inserted into a beverage preparation device.

[0078] The starter culture of yeast may be added as a liquid or a powder to the coffee cherry pulp. The coffee cherry pulp may have a moisture content of between 45 and 55 wt. % when the starter culture of yeast is added. The fermentation may occur at a solids content greater than 40 wt. %, for example greater than 45 wt. %, for further example greater than 50 wt. %.

[0079] Drying the fermented coffee cherry pulp may commence while some fermentation continues. For example, the coffee cherry pulp may be placed in a container such as a tank, the starter culture added and then fermentation allowed to proceed for 1-4 days before the fermented coffee cherry pulp is removed from the container and dried. For further example, the starter culture may be added to the coffee cherry pulp before the coffee cherry pulp is slowly dried, for example on a rack or suspended tray. Once fermentation has started, the coffee cherry pulp may be slowly dried whilst fermentation continues. For example the fermented coffee cherry pulp may be dried to a moisture content of below 20 wt. % (for example below 15 wt. %) over a period of between 1 and 30 days, for example between 4 and 20 days. The drying temperature may be less than about 40° C., for example between about 25° C. and 35° C. A fan can be used to blow dry air over the material until the coffee cherry pulp is dry. The fermented coffee cherry pulp may be dried in the sun.

[0080] The yeast may be Pichia kluyveri, for example Pichia kluyveri NYSC 5485.

[0081] The container for the preparation of a beverage when inserted into a beverage preparation device may be in the form of a pod, pad, sachet, pouch, capsule or the like.

[0082] The coffee cherry pulp according to the solid-state fermentation method may be essentially free from coffee beans, for example it may have been processed by a pulping machine which squeezes the cherries between fixed and moving surfaces and separates the coffee beans. The coffee cherry pulp may for example contain less than 10 wt. % coffee beans, for example less than 5 wt. % coffee beans, for example less than 1 wt. % coffee beans.

[0083] The coffee cherry pulp according to the solid-state fermentation method may be provided in the form of coffee cherries comprising coffee beans. The coffee beans may be separated from the coffee cherry pulp after fermentation.

[0084] The ready-to-drink beverage may be filled into a bottle or can. The fermented cascara may be combined with other extractable materials such as tea or roast and ground coffee before being extracted with water to form a ready-to-drink beverage.

[0085] The fermented cascara may be combined with roast and ground coffee in a container for the preparation of a beverage when inserted into a beverage preparation device.

[0086] Those skilled in the art will understand that they can freely combine all features of the present invention disclosed herein. In particular, features described for the product of the present invention may be combined with the method of the present invention and vice versa. Further, features described for different embodiments of the present invention may be combined. Where known equivalents exist to specific features, such equivalents are incorporated as if specifically referred to in this specification.

[0087] Further advantages and features of the present invention are apparent from the figures and non-limiting examples.

### EXAMPLES

### Example 1: Method of Fermenting Cascara

[0088] Two different cascara origins were used in the experiment; cascara harvested from wet processing in 2018 from Brazil and Mexico and then dried. A hot infusion was firstly made by adding 20 g cascara in 1000 ml of water at 90° C., and incubating for 1 h when the temperature drops below 30° C. The reference cascara infusion (Ref) was made by discarding the cascara and subjecting the infused water to filter sterilization (0.2 pm).

[0089] The fermented cascara was made by fermenting the infusion with different starter cultures, including Pichia kluyveri NYSC 5485 (CNCM 1-5525), P. kluyveri NCYC 246 (the type strain of Pichia kluyveri), commercial brewer's yeast Saccharomyces cerevisiae (SafAle S-33, LeSaffre, France) and a symbiotic culture of bacteria and yeasts (SCOBY) pellicle from Kombucha tea fermentation. All strains (except for SCOBY) were grown from glycerol vial in a food-grade yeast-peptone liquid medium, and inoculated in the reference cascara brew at log 6.5 (CFU/g). All the inoculated infusions were stored at microaerobic condition at 30° C. for 24 h. After the incubation, the cascara was discarded and infused water underwent filter sterilization (0.2 um). In addition, an un-fermented infusion was also done by incubating the hot infusion at 30° C. for 24 h without any inoculation as a negative control (Control 24H). All final products were subjects to filter sterilization for sensory evaluation. The viability of the different starter cultures was tested by fermenting in a yeast growth medium.

### Example 2: Sensory Analysis of Cascara Fermented with Different Yeasts

[0090] The sensory profiles of different variations of cascara infusions were evaluated by a panel of ten members. The evaluation was divided into two sessions based on the sources of cascara used, i.e., Brazil and Mexico cascara. In each session, a comparative profiling analysis was conducted between the reference infusion and other variations, including fermented variants of P. kluyveri NYSC 5485, P. kluyveri NCYC 246, S. cerevisiae S-33, SCOBY pellicle, as well as the non-fermented negative control. All samples were served at room temperature and seven sensory attributes were evaluated by the panel, including overall flavor intensity, fruity, floral, fermented, acid, sweet, and bitter notes. For each attribute, the difference with the reference was rated on a structured intensity scale going from −3 (much less) to 3 (much more), with the reference set as 0.

[0091] The results are plotted in FIG. 1 (cascara from Brazil) and FIG. 2 (cascara from Mexico). The samples fermented with a Pichia yeast (NYSC5485 and NCYC246) have enhanced sweet, fruity and floral notes. P. kluyveri NYSC 5485 provides greater fruity intensity than the type strain P. kluyveri NCYC 246.

### Example 3: Analysis of Aroma Compounds Present in Cascara from Mexico Fermented with Different Yeasts

[0092] Semi-quantitative volatile profiling of the cascara infusions were conducted by headspace/solid phase microextraction coupled with gas chromatogram and mass spectrometry (HS/SPME-GC-MS). The apparatus used was a gas chromatograph coupled with a single quadrupole mass spectrometer (Agilent Technology 5973N).

[0093] Initially, 1.0 ml of the cascara infusion samples were incubated in a 10-mL screw-top headspace vial at 30° C. for 10 min, followed by extraction using a SPME fiber (PDMS/DVB, Supelco) at 30° C. for 10 min. All vials were placed in a tray cooled at 6° C. before analysis. The volatiles were thermally desorbed from the SPME fiber at 250° C. in splitless mode and resolved with a s capillary column (DB-WAX, Agilent). The GC oven temperature was programed initially at 35° C. for 5 min, then raised to 230° C. at 4° C./min, then at 230° C. for 10 min. Helium was used as the carrier gas at a flow rate of 1 mL/min. The targeted compounds were identified by pure standards and quantified in MSD ChemStation software (Agilent). All samples were measured in duplicate. The concentration of ethanol was measured by headspace coupled with GC and flame ionization detection (HS-GC-FID, Agilent Technology 7890B). 1.0 ml of each sample was incubated in a 10-ml headspace vial for 5 min at 40° C., and then 1 ml was sampled and injected into the GC with a split ratio of 5. The GC oven temperature was programed initially at 35° C. for 1 min, then raised to 70° C. at 4° C./min, then to 180° C. at 12° C./min, and then held for 2 min. Helium was used as the carrier gas at a flow rate of 2 mL/min. All samples were measured in duplicate.

[0094] Levels of 2-phenylethyl acetate, isopentyl acetate and isobutyl acetate in parts per million are plotted in FIG. 3. The samples fermented with a Pichia yeast (NYSC5485 and NCYC246) have elevated levels of these acetate esters with P. kluyveri NYSC 5485 delivering the highest levels. Weight ratios of aroma components are given in the table below

| | | | | | S. |
|---|---|---|---|---|---|
| | | P. kluyveri | P. kluyveri | | cerevisiae |
| Ratio | Control 24H | NYSC 5485 | NCYC 246 | SCOBY | S-33 |
| 2-Phenylethyl | 0.5 | 28.3 | 17.5 | 0.6 | 0.6 |
| acetate/Benzaldehyde | | | | | |
| Isopentyl acetate/Benzaldehyde | 0.3 | 134 | 30.9 | 0.3 | 0.3 |
| Isobutyl acetate/Benzaldehyde | 0.1 | 2.7 | 2.7 | 0.1 | 0.1 |
| Isopentyl acetate/3-Methylbutanol | — | 2.7 | 3.2 | 0.2 | — |
| Isopentyl acetate/Hexyl acetate | 3.4 | 1262 | 155 | 3.6 | 3.9 |
| Ethyl acetate/Benzaldehyde | — | 990 | 1229 | 14.5 | 5.1 |
| Ethanol/Benzaldehyde | 428 | 27522 | 28069 | 18729 | 99052 |
| 2-Phenylethanol/Benzaldehyde | 1.2 | 18.4 | 12.0 | 2.6 | 151.6 |

[0095] The amount of ethanol produced after 24 hours fermentation with P. kluyveri NYSC 5485 was 0.03%.

[0096] The samples fermented with a Pichia yeast (NYSC5485 and NCYC246) show higher ratios of 2-phenylethyl acetate/benzakdehyde, isopentyl acetate/benzakdehyde, isobutyl acetate/benzaldehyde, isopentyl acetate/3-methylbutanol and isopentyl acetate/hexyl acetate than the control and the samples fermented with S. cerevisiae or SCOBY. P. kluyveri NYSC 5485 delivers higher values for these ratios than the type strain P. kluyveri NCYC 248.

### Example 4: Comparison of Genetic Sequence of P. Kluyveri NYSC 5485 to the Type Strain P. Kluyveri NCYC 246

[0097] The genetic sequence of Pichia kluyveri NYSC 5485 (CNCM 1-5525) and P. kluyveri NCYC 246 were analysed using PacBio sequencing technology. DNA purification was performed using a Qiagen Gentra Puregene Yeast kit. Twelve DNA fragments were identified for P. kluyveri NYSC 5485 and 15 for the type strain P. kluyveri NCYC 246. The genetic sequences for P. kluyveri NYSC 5485 are filed in electronic form as SEQ ID NO:1-SEQ ID NO:12 and the genetic sequences for P. kluyveri NCYC 246 filed as SEQ ID NO:13-SEQ ID NO:27. The mitochondrion DNA was SEQ ID NO:4 for P. kluyveri NYSC 5485 and SEQ ID NO:20 for P. kluyveri NCYC 246.

[0098] The genetic sequence of Pichia kluyveri NYSC 5485 (CNCM 1-5525) was compared with that of P. kluyveri NCYC 246 using the software OrthoANIu. The global average nucleotide identity was found to be 97.91%. Correspondences between the different sequences are given in the table below. Some sequences for Pichia kluyveri NYSC 5485 correspond most closely with a combination of sequences for P. kluyveri NCYC 246 and vice versa.

| Pichia kluyveri | P. kluyveri | Average nucleotide |
|---|---|---|
| NYSC 5485 | NCYC 246 | identity |
| SEQ ID NO: 7 | SEQ ID NO: 16 | 98.16% |
| SEQ ID NO: 10 | | |
| SEQ ID NO: 5 | SEQ ID NO: 22 | 97.90% |
| SEQ ID NO: 12 | | |
| SEQ ID NO: 11 | | |
| SEQ ID NO: 1 | SEQ ID NO: 13 | 97.87% |
| | SEQ ID NO: 15 | |
| SEQ ID NO: 3 | SEQ ID NO: 14 | 97.73% |
| SEQ ID NO: 8 | SEQ ID NO: 17 | |
| SEQ ID NO: 6 | SEQ ID NO: 27 | 97.94% |
| SEQ ID NO: 9 | | |
| SEQ ID NO: 2 | | |
| SEQ ID NO: 4 | SEQ ID NO: 20 | 99.02% |

[0099] The type strain P. kluyveri NCYC 246 comprised a genetic sequence with a maximum identity to each SEQ ID NO:1-12 taken individually as follows: SEQ ID NO:1, 97.85%; SEQ ID NO:2, 97.40%; SEQ ID NO:3, 97.86%; SEQ ID NO:4, 99.02%; SEQ ID NO:5, 98.05%; SEQ ID NO:6 97.93%; SEQ ID NO:7, 98.12%; SEQ ID NO:8 97.07%; SEQ ID NO:9, 97.20%; SEQ ID NO:10, 98.33%; SEQ ID NO:1, 197.526%; SEQ ID NO:12, 97.77%.

[0100] Various features and embodiments of the present invention will now be described with reference to the following numbered paragraphs (paras).

[0101] 1. A beverage composition comprising fermented cascara or fermented cascara extract wherein the weight ratio of isopentyl acetate to benzaldehyde is greater than 1.

[0102] 2. The beverage composition of para 1 wherein the weight ratio of isobutyl acetate to benzaldehyde is greater than 0.5.

[0103] 3. The beverage composition of any one of paras 1 to 2 wherein the weight ratio of isopentyl acetate to 3-methylbutanol is greater than 0.5.

[0104] 4. The beverage composition of any one of paras 1 to 3 wherein the weight ratio of isopentyl acetate to hexyl acetate is greater than 10.

[0105] 5. The beverage composition of any one of paras 1 to 4 wherein the weight ratio of 2-phenylethyl acetate to benzaldehyde is greater than 0.9.

[0106] 6. A beverage composition comprising fermented cascara or fermented cascara extract wherein the weight ratio of isobutyl acetate to benzaldehyde is greater than 0.5.

[0107] 7. The beverage composition of para 6 wherein the weight ratio of isopentyl acetate to 3-methylbutanol is greater than 0.5.

[0108] 8. The beverage composition of para 6 or para 7 wherein the weight ratio of isopentyl acetate to hexyl acetate is greater than 10.

[0109] 9. The beverage composition of any one of paras 6 to 8 wherein the weight ratio of 2-phenylethyl acetate to benzaldehyde is greater than 0.9.

[0110] 10. The beverage composition of any one of paras 6 to 9 wherein the weight ratio of isopentyl acetate to benzaldehyde is greater than 1.

[0111] 11. A beverage composition comprising fermented cascara or fermented cascara extract wherein the weight ratio of isopentyl acetate to 3-methylbutanol is greater than 0.5.

[0112] 12. The beverage composition of para 11 wherein the weight ratio of isopentyl acetate to hexyl acetate is greater than 10.

[0113] 13. The beverage composition of para 11 or para 12 wherein the weight ratio of 2-phenylethyl acetate to benzaldehyde is greater than 0.9.

[0114] 14. The beverage composition of any one of paras 11 to 13 wherein the weight ratio of isopentyl acetate to benzaldehyde is greater than 1.

[0115] 15. The beverage composition of any one of paras 11 to 14 wherein the weight ratio of isobutyl acetate to benzaldehyde is greater than 0.5.

[0116] 16. A beverage composition comprising fermented cascara or fermented cascara extract wherein the weight ratio of isopentyl acetate to hexyl acetate is greater than 10.

[0117] 17. The beverage composition of para 16 wherein the weight ratio of 2-phenylethyl acetate to benzaldehyde is greater than 1.

[0118] 18. The beverage composition of paras 16 or 17 wherein the weight ratio of isopentyl acetate to benzaldehyde is greater than 1.

[0119] 19. The beverage composition of any one of paras 16 to 18 wherein the weight ratio of isobutyl acetate to benzaldehyde is greater than 0.5.

[0120] 20. The beverage composition of any one of paras 16 to 19 wherein the weight ratio of isopentyl acetate to 3-methyl butanol is greater than 0.5.

[0121] 21. A beverage composition comprising fermented cascara or fermented cascara extract wherein the weight ratio of 2-phenylethanol to benzaldehyde is greater than 2.7 (for example greater than 2.8, 2.9, 3.0) and the weight ratio of ethanol to benzaldehyde is less than 50000 (for example less than 40000, for further example less than 30000).

[0122] 22. A method of preparing a beverage composition comprising;
[0123] adding a starter culture of yeast to coffee cherry pulp, wherein the starter culture provides at least 10⁴ CFU (for example at least 10⁵ CFU, for further example at least 10⁸ CFU) of yeast per gram of coffee cherry pulp; fermenting the coffee cherry pulp;
[0124] drying the fermented coffee cherry pulp to form fermented cascara and either;
[0125] extracting the fermented cascara with water to form a ready-to-drink beverage, or;
[0126] filling the fermented cascara into a container, the container being for the preparation of a beverage when inserted into a beverage preparation device.

[0127] 23. The method of para 22 wherein the yeast is Pichia kluyveri, for example Pichia kluyveri NYSC 5485 (CNCM 1-5525).

[0128] 24. The method of para 22 or para 23 wherein the beverage composition is according to any one of paras 1 to 21.

[0129] 25. The method of any one of paras 22 to 24 wherein the beverage composition is according to any one of paras 32 to 37.

[0130] 26. The method of any one of paras 22 to 25 wherein the coffee cherry pulp is essentially free from coffee beans.

[0131] 27. The method of any one of paras 22 to 26 wherein the coffee cherry pulp is provided in the form of coffee cherries comprising coffee beans and the beans are removed after fermentation.

[0132] 28. The method of any one of paras 22 to 27 wherein the fermentation occurs at a solids content greater than 40 wt. %, for example greater than 45 wt. %, for further example greater than 50 wt. %.

[0133] 29. The method of any one of paras 22 to 28 wherein the fermented cascara is filled into a container such that the container contains fermented cascara and roast and ground coffee.

[0134] 30. Use of coffee cherry pulp fermented with Pichia kluyveri NYSC 5485 (CNCM 1-5525) to produce a beverage.

[0135] 31. A beverage composition comprising fermented cascara and/or fermented cascara extract wherein the weight ratio of 2-phenylethyl acetate to benzaldehyde in the fermented cascara and/or fermented cascara extract is greater than 0.7, for example greater than 0.8, 0.9, 1.0, 1.5, 3, 6, 10, 15, 20, 25, 30.40 or 50.

[0136] 32. The beverage composition of para 31 wherein the weight ratio of isopentyl acetate to benzaldehyde in the fermented cascara and/or fermented cascara extract is greater than 1, for example greater than 1.5, 3, 6, 10, 15, 20, 25, 30, 40, 50, 60 or 70.

[0137] 33. The beverage composition of para 31 or para 32 wherein the weight ratio of isobutyl acetate to benzaldehyde in the fermented cascara and/or fermented cascara extract is greater than 0.5, for example greater than 1, 2, 3 or 4.

[0138] 34. The beverage composition of any one of para 31 to para 33 wherein the weight ratio of isopentyl acetate to 3-methylbutanol in the fermented cascara and/or fermented cascara extract is greater than 0.5, for example greater than 1, 2, 3 or 4.

[0139] 35. The beverage composition of any one of para 31 to para 34 wherein the weight ratio of isopentyl acetate to hexyl acetate in the fermented cascara and/or fermented cascara extract is greater than 10, for example greater than 100 or 500.

[0140] 36. The beverage composition of any one of para 31 to para 35 comprising roast and ground coffee or soluble coffee.

[0141] 37. A container containing a composition comprising (for example consisting of) dried fermented coffee cherry pulp, the container being for the preparation of a beverage when inserted into a beverage preparation device.

[0142] 38. The container of para 37 wherein the composition comprises roast and ground coffee.

The application's sequence listing, which the Patent Office published only in electronic form, follows.

SEQUENCE LISTING (27 sequences)

SEQ ID NO: 1 - DNA, 2574377 bp, Pichia kluyveri
  >Nicaragua_Y298_000001F_chromosome
cgacctacttcactataccccccctgcgacctacttcactataccccccctgcgacctacttcactataccccccctgcgacctacttcactataccccccctgcgacctacttcactataccccccctgcgacctacttcactataccccccctgcgacctacttcactataccccccctgcgacctacttcactataccccccctgcgacctacttcactataccccccctgcgacctacttcactataccccccctgcgacctacttcactataccccccctgcgacctacttcactataccccccctgcgacctacttcactataccccccctgcgacctacttcactataccccccctgcgacctacttcactataccccccctgcgacctacttcactataccccccctgcgacctacttcactataccccccctgcgacctacttcactataccccccctgcgacctacttcactataccccccctgcgacctacttcactatacccccctgcgacctacttcactatacccccctgcgacctacttcactataccccccctgcgacctacttcactataccccccctgcgacctacttcactataccccccctgcgacctacttcactataccccccctgcgacctacttcactatacccccctgcgacctacttcactataccccccctgcgacctacttcactataccccccctgcgacctacttcactatacccccctgcgacctacttcactataccccccatgcgacctacttcactataccccccctgcgaccccccctgcgacctacttcactatacccccctgcgacctacttcactataccccccctgcgacctacttcactataccccccctacttcactatacccccctgcgacctacttcactatacccccctgcgacctacttcactataccccccctgcgacctacttcactataccccccctgcgacctacttcactataccccccctgcgacctacttcactataccccccctgcgacctacttcactatacccccctgcgacctacttcactataccccccctgcgacctacttcactataccccccctgcgacctacttcactatacccccctgcgacctacttcactataccccccctgcgacctacttcactataccccccctgcgacctacttcactataccccccctgcgacctacttcactatacccccctgcgatctacttcactataccccccctgcgacctacttcactataccccccctgcgacctacttcactataccccccctgcgaccccccctgcgacctacttcactataccccccctgcgacctacttcactatacccccctgcgacctacttcacttcactataccccccctgcgacctacttcactataccccccctgcgacctacttcactataccccccctgcgacctacttcactataccccccctgcgacctacttcactataccccccctgcgacctacttcactataccccccctgcgacctacttcacttcactatacccccctacttcactataccccccctgcgacctacttcactatacccccctgcgacctacttcactatacccccctgcgacctacttcactataccccccctgcgacccacttcactataccccccctgcgacctacttcacttcactatacccccctacttcactataccccccctgcgacctacttcactataccccccctgcgacctacttcactataccccccctgcgacctacttcactatacccccctgcgacctacttcactatacccccctgcgacctacttcactatacccccctgcgacctacttcactataccccccctgcgacctacttcactataccccccctgcgacctacttcactataccccccctgcgacctacttcactataccccccctgcgacctacttcactataccccccctgcgacctacttcactataccccccctgcgacctacttcactataccccccctgcgacctacttcactatacccccctgcgacctacttcactataccccccctgcgacctacttcactataccccccctgcgacctacttcactataccccccctgcgacctacttcactataccccccctgcgacctacttcactataccccccctgcgacctacttcactataccccccctgcgacctacttcactataccccccctacttcactataccccccctgcgacctacttcactatacccccctgcgacctacttcactataccccccctgcgacctacttcacttcactataccccccctgcgacctacttcactatacccccctgcgacctacttcactatacccccctgcgaccccccctgcgacctacttcactataccccccctgcgacctacttcactataccccccctgcgacctacttcactataccccccctgcgatctacttcactacttcactatacccccctgcgacctacttcactataccccccctgcgacctacttcactataccccccctgcgacctacttcactataccccccctgcgacctacttcactataccccccctgcgacctacttcactacttcactataccccccctgcgacctacttcactatacccccctgcgacctacttcactataccccccctgcgacctacttcactataccccccctgcgacctacttcactataccccccctgcgacctacttcactataccccccctgcgacctacttcactatacccccctgcgacctacttcactataccccccctgcgacctacttcactataccccccctgcgacctacttcactataccccccctgcgacctacttcactatacccccctgcgacctacttcactataccccccctgcgacctacttcactataccaccaccctgcgacctacttcactataccccccctgcgacctacttcacatctacttcacttcactacttcactataccccccctgcgacctacttcactataccccccctgcgacctacttcactacttcacatctacttcactacttcactacttcacttcactacttcacttctcatatacccccccctgcgacctacttcacattgattttctctttctttcaactaattctttccattcttctcctttacgtatttgctcatcattaatatttttagaagataataatttataaattaaatttgtaaatgtattaaattttccaaaattcttcaatgccggtcttaaaagaagaaattcattatctaagttcagttgtgcaatatcccatacggccatttctccggttatattcaaaacgaaaacagaataaaagactattaattttctcatatcgtcttcatcatcaaagtcatcaaaataaaacgttaaataagattttaactcagcaaacgataatataaatagaggatcaaaatgtactcttcttgcaaaatatctatacttttctggaaattttaatttatgataagcattatatatatcttcttcaaatatggagtgattagaatccgcaattttttttaataacacaactccatctttattcaataacaatctaggtgcttcattcattgaaagaaaacttaaatatataattatccattaagaagataatcatttccgttgtaaattgggaaattactaaattcaatttttgtaatgtaaaatattacgtaaaacaaaagtatacaaagttatatttacacaaatacgctatttatacaagaccatgacaaaatactctataacatcacttggtatcgaacataaaataatttacatactgaaaagcttgtaattctttgatcattccatttctttcaaaacaattaactgcattccatccaaaaaaacattttaaaagaatcaattttgcacctttgggtatctttttataaataaaagtttcatttctaatatacaataatgaaagaaacattagctgtaccaaaaattttgaactactttaggtttattttttaagtctttattccatttgaaacatctcaatcttttagcattttcaatgaagttctttctccacttttcatttctttttgaagtttcaacttttttttatgataattcaacaaattaatttgaaagcatctttaactcttttagatacccttacacatacaccattcctaaattttgattcttccttaaatccaacaatatctcttttttcaaattttaaaacaacaaaatcagcatataaatgaacaattcctttcatttgaaaaaacttactgacatgttcaatcagcaaattattcaacagttcataaacttcattacgagcattgtcttgtgatttttgtatctcaacatccataaatttttcaaattatcatatctatttgattcactaatagattttgatccggatactctatttccattaccatccacaaagttactatatttgattccatctactaaagtcataaaagaattgtcattttgtctttatcatcattatgaaagtctaaatactccctttaactattttctaattcatcttcaacatatccaaatgaaaatggtttagtaattacctgattaagttttctaataaatttatcatcaataaaatgattacaacagttttcatgtccattgtaaataaaattataaaactttttaacttctgaagaacgacatataaaattttcatcaaatatcaataccattcctttaaattttataaaattcaaaatttgtatgaaaatctcaatcttaggattatattcatataagataacaagttgtatatcaggtatttcaaaatcattcacatcatactctgttgtaatcaatacacgtttgttagaatcattttgaaatttattggtaatagaagttttactattagaatcttcaaataataaaagagaacaatctgaattaactaatgaattaaagttatcatatagttcatgcattttatctttattatcactgatgacaacacttttccctcttgaatgagacaaaaatttaattagggtatttgttatttcatcttctaaattagtattttcaaagttcatatgctttatctgtattctatttttgtatggaagttcattaactattgaccttatcttaatttcattattcaacctgaaaactttgcgtaaactttgtgctgtttctatattcataatgtgagacatcatcaatattcttgaaaatctattgaaattgaattctatggatgattctctaatgtttggattaaacttatttttttgtatgatttgatgacaatcctctaagaaaaataacccaggctttgaatcttttaacaaagtatcaagatctgtatcagattgataagaacctatataaacatcaaatttctctgcagatgaaaataattgttcagtactctcacctatatcaccaacattgaatccatgtaatactaaaattgatttgaaattatcttttgaagtagtgtaagaaagtaaaattatattaattaattcaggtgattgtttattcatagctttcaataataatatcaaaataatcatattagaatctaatgattttgattgaatataatactggccatcctaaattgtaatctttttaagtatattgatttctacttcactaattgatgaatttagggaaagagttttttttttcttccattaataaattaaaatatggaatattaattttatggtatgattgatcatatatataattttagctaatcctgtaagttcaggtagataatgggcaaaaaaaggcaatgtgtaataatttgcaactgtccaaggagattctagataaacattttcatcaatggtatacaatttttcacctttatgatttttaaaagagaacatttcaaataattttgaagtagaatatgtttaatcaattatgaaatattcatcaccccttgcaacatgatcactgacaattttaataccatattcaactagtagaggacatgtatgcaccattatacttggttaattgatcacaaaaaaatttagcagtctttagattggtttaattgttgaattcatggctatctatttcgattggatcatcatctgtatctgttggatgtacagtcattataaaagaaagtgttcattatgaaagaacaatttgccatcaattaatgatacttcaaatcatgttgaaaagagaaggggcaacttaagcgatatttttaattgcccttttttcaaatttccacattttattgaactattggtatttgcttttaataaagtaacctatagtatcttttgttaatttatggcatttatacaggtctaaatttattagtttcgtattttattaaatattgaaatatatacctttctaatgatttttaatatttgtaaaataagctagctaaactatttttcaaaatattttctgaaaaaaagttgtgtagaaattgtatttcgaattaactaggcaatgtatcttgaactaattaactaattcaaatgttaaaaaagcctaaatattgcattctaactagtaaaattataaattaacatacttcaacatactatcacgtgacacagtaaatcactacggactatattaagcatgtaatttaaacataacaagcgcaagtggtttagtggtaaaattcaacgttgccatcgttgagcccctggttcgattcctggcttgcgcagttatttttttaacttccttttttaataagaacctctacttacacgtatatcatttctttttttctgtaacataaaactaaaatgtttctttaatgtaactattctttctattttttacacattcaacaatcctttatgcaatttgaagaacatccatttcctaaacatgttcaaacaataggagaaaagattcatattatatcaaaaaaatgtaaattatctaaacatcaattaattattttaattataattccatttataataattttcggtcaaataatgagttatatatctcctgatgaatcaatacataattattttacttcaaggggtaatctgattaatacatattttgttaaatttagttggttttggacaattgtaacttatctgaatattattataaataaattaaggaaaggttcaattaataatagaaaatttattctatcaatttcaagagttttattaattacattatgttggtatttatttactcaatggttttttggtcctccaattatggatagagtattcctgcttactggtggtaaatgtgttgatgttgattataataaaatacctgaaaagattaaacatttatttaaattgtcaatgtcacaaatttcaaataatgataataatattgatattgatattgagaaacaattagcatattcaaatcaaatttcttcagctacttgtaaaatttacaaaggtaaatgggagggtggacatgatccatcgggacatgtatttattttaacattatcggtatgtctattaattgttgaaactatagaattttacacaattgaagatgaaatatttcataatttctttaataatgttataacattaaatcaagttttaaaatctcctatatttatgactatgattgttgttataactgctttaagtatgttatttatgacagttttgaaatatcatagtttgggtgaacaactggcaggattttctgtttctgtttttgctttatggttagttaatagaataattgagcttatcggtctgaataggacatcataatactaatattactgctttatagaacaaatagctttgtataatataccaatgatcaactttggcatctttacgtaatcatgtacataataaaattgataacctaattagttcaatagattgattgattgattgattgatgttctttctttctttctttctttctttttaatctccaatgaatcattattaaatcatacaacacatcaatacaatacaaataatatgcatacaacaaaatctgatataacggcatggtctttaattgcacttgcagctgaaccttatgttgtttcagttttaggatcttatactccaattttattagaacaattagctagagaaaatggtgttttaggtagtgatcatttaactccatgtatatcacatgtaatacctcctatattagatccgaatccttctttaaatataacaactgaaaatgttaatttttgcgttttaccaatattaaatggtaaattttatattgatacatcaagttatgcattatatactttttcattttcagttttaattcaaacaacatgtgttctaacaataagtggaattgcagataatactccttataagaaacgattgatagttttgtttggaagtttaggaggtttaacaactatgttatttttcttattaggttcacataattattatgcagcttcaatttttgcaatattggcaaattgttgctttggttgtgttaacgttttaatgaattcatatttaacattgctggttcaaaattatccatatgaaaatattaaaaataataataataataatgaaaatgaaaatgaaaatgatcgtgatgttgatgttgatgaaaattcttcattaatcaacagtgaagatataaatacaattgaaaactctgaattaggaaaagtaagttcaaaaattagtgggattggaacaacaacgggatatattgctgcacttttaattcaaattacatcattattatcattaaaatatttaaaatcaattcatgatgatatgatatggtgtattaagacaattattggatcaattggaatttggtggtttgtttggcaaataccaattggtttatttttgagaaatatatacaacaagaaattattaaataattcaagattatcaataactaaatcaattaaaaagggttactatgatttatttcatgctgctaataaaattaaagatttaaaagatatttatctatttcttttaggttggtttttcctatctgattcaataactacaattaattccactgcgattttatttgctaaaactaatcttaatatgacaactatatcattagctaaaattggagttttagttatgattagtgcaattactggatcaatattaattccaaatattattattggttatttcaaatttgatttacaacatgcattaataggtttaattatttggtgtttatgtgttccaatgtatggaattgctgcattatctacaaatattgaaatgtattgtttagcaatttggtatggtgttggattaggtggtttaagtactgttagtaaaggtatattttcaattattattccaaagggtaaagaaagtgttttcttctcaattttcagtttaacagataaaacaagttcaattgttggaccatttttaattgggttaataattaattatttccataatttaagaggtgcattttgggttttatcatttattttaatcattagtttaccaatactttcaattaaatttgatttaagtagagcaagaatggaatcacaaaattttgtctgataaatagttaaatagtttatttgtaatgacaaaatattatacccataatatactctatcgattgattgtgataagaaaatgcataaatggttatttaaccatttagatagcctgatcttacattgatatccacacttaatgattgaaattacattaactaagaaagagagtttattgtacctgcattagacaggggaatcagttctgtttacaactacagttattccattttcataaaaggtagatatagtattgttaccaattgttaggttaaaaaagaaaccatagcttatatatttgatctaagttaaaagaatttaaattaatggttttggaacaacattatcttttgaaaaatctctttcttcaccatattttccaaaaccaagataacctttatttatcattggagtataaaaatattctctttcataatgagttaattcataacctttctttaatctttcaactaaatcaggatttgaactataataacgtccaaaaccaattaataatttatcatcattattaataacattttctaatttatcaattgttttaggatcagcataaccaccatttctaattaaaatacctttccaaaaaaatctaacccatgaaatatcaaaattaactttaactttaatttcttcagttggaataagttgtgatctaggttcaacaactgaaacataagctaattctttaccttcatttgctcttttttgtaattcacctaaaatataaccccaagtaacaattggattaatttcagaatcttcaccttcaccacccataaatttcatataaggagaaaatttaattccaatacgatttgaaccaattgtttcaataagagcatcaacaatttctaatataattcttgatctattttcaattgaaccaccatatttatctgttcttttatttgaaccaggttgaataaattgatcaagtaatgtcatatgagcactatgaatttcaacaaaatcaaaacctgattcattaattacctttttagctattttagcaaaatttttaatataattttcaatttgatcaattgataattcctttaattcaatattattatcttcaaaatctttcttttgttgatcatccatgaaaattggtgatggagcataaattggatcatatttatcatcaacattttttttcatcatcattaaacttgccattctacctatataaagaagttgagctgaaatatatgaacctttcttatgaactgcatcaacaataattttcattgctttaccagttttttcattactccaacttggaaaataaagttgatttgtaaattcttcttcaacaaatgcaccttccaatataattaaaccaccattattttctgcacgttcttcataatattttaacattgaatcagttggaatatgatctaaagtaactcttgaacgagtagttggtgcatgaacaattctattctttaaagtaacagggccaactttaattgatttaaataaatttgaattttctaatgtcattttattatcttatcttatcttatcttatcttatcttatcttatcttaactattttgataaataataaaattaaatttttcaacatatatataatatatcaatatttggaaactttcactcctttttatattaatgatcacattcataatattaaataacaaattacctgattataaattaaataacgtgaattattaatgtttaattatatcaacaattaccgttatcattcttaaatcctttaattgttccttaattccgtcaaatggcattacctgcttacaaatacacaaaaaatttatatacaaatacagttaaaaaataatcaaaagacaataagtatagctcacataatatcataggctattagatacacaacaaacaagataattcaagatatatattataaataatgatagcaggttaatttaatttctcaaatctttaatattaaaactacgtaaaaattgttgattatacactgtgagtaagtattgttaataaaggaagttagagtacaacattaggttattagttatacattatagtttagttagttatagtatttatagttcttatatagacgaagtattgtttggtcctagaaggaaatatattggtagaagattacaactttattacaagaggtgcaatttggggtttatcatttattatactttataaatttattgtagataattaccttaaaaatttctataagaaggcttcgtttagtacattaattaagccacattgttgttaaattatcgaattcatgtgtttttcttgaaataaaaacagaaaatgcataattgtttataaatattaaaataattccaaaacaagagtattttgaccaaatcaatgaaatatttgctaaaacttttttaactcctaacatgttttaaatactttttaaagtaatttatccatttacaaaccactctaagataaatattagcaaagaatacagggtaaatcactacaaaatcattataaataaaacccgcttacataagccaaacaattattgaaaacaccacccctaattatttacaacacttggttgtatagtgtagtggttatcactctcggttttgatccgggcaaccccagttcgaatccgggtacgacctttactttttttctatttaataatttttttttgtttattaaatattaaataaaattctcaataatttttcagtttgaaattttactagtaatttatatcgacatgactcactagtaatacttttcttcaaaagatttcattattaatatataacttacctttaggattaaacaactcaacattaaaatgacagattgtcaacctgcattcccacaatttttagaatatgttaaaactgatgaagaatcaaatgttttcccagtttataaatttttaagtgcacattatttaacaccacatactgcatatttaaaattagttggatcacaggaaactccaactgaatcattcctttttgaaagtgcaacaaatggtgaacaagtttcaagatattcatttatgggtattcaaccacgtaaaataattaaaactggtccaactgaacaaaatgaaattgatccattaattttattagaaaaagaattatcaggtataaaacaagcacaattacctggtgtaccaaaattaagtggtggtgcaattggttatatttcttatgattgtattaaatattttgaaccaaagacaaagaatgatgatttaaaggatgtacttaaattacctgaatcatttttaatgttatttgatttaattattgcatatgataatgttttccaaagatttcaaataattaataatattcatgttgatagatcaattgataatgaaaattcattaattgaaaaatataataaagcatcaaatgaaattgaaaaaatttccaatattttaaaatcaagtgaagttaaatatcctgaacaaccgaaaattgagaaaagtgaagattttacttcaaatattggtcaagaaggttatgaaggttttgttcataaattaaaggaacatattaaaaagggtgatgttattcaagcagttccatcacaaagaattagtcgtccaactaaattacatccatttaatatttataatcatttaagaactgttaatccatcaccttatatgttttatattgattgtttagaatttcaaatagttggtgcatcacctgaattattagttaaatcagattcaaatgataaaattataacacatccaattgcaggtacaattcgtaggggtaaaacaattgaagaagataatttattagcaaatgaattaaaatcttcattaaaagatcgtgcagaacatgttatgttagttgatttagctagaaatgatattaatagaatttgtaatccaatgacaactaatgttgatagtttacttcaagttcaaagattttctcatgttatgcatttagtttcacaagttagtggtattttacgttctgataaatcaagatttgatgcatttagatcaattttccctgctggtacagtttcaggtgctccaaaagttcgtgcaatgcaaattattagtgaattagagaaggagaaaagaggtatttatgcaggtgctgttggtcattggtcctatgatggtaaaacaatggatacttgtattgcattacgtacaatggttgttaaaaatggtacagcatatttacaagcaggtggtggtattgtctatgatagtgatccatatgatgaatatattgaaacaatgaataaaatgaaagctaataataatacaattgttgaagctgaaaaattatacatgtaattatatactatccttaattccgtaactcttttataacttattaatattaatacaataacaacttgattattataaaatagatttttgaaaaatgatgaaattcatgtaatcgaggaaatgatttattttttatcaattttgccatcatgaatcttctttctctaacaaaccaaggcaaagcaactaataattatgtcaaatcaacaggcaattgatgaatttgtgggcattactggtatagctacttctgttgcagaacaatatcttgcaagaaatgaatatgatgtgatgttagcagtcaatgattattataataatgaacatgttgaaccaggatcaaaacctgaaacatcatcaaatactaataaaagatcaacacaatcaactggagctaaagttaaatcattttcagatttaaataaaagtaataataattataataatgatgattcagatgataatgatatgaattttttcacaggtgggcaaaaatcaggattagcagttgaagatccaaataaatctaaaaatggtagaagtttagttgatgatttaatcgaaaaggcagaaaaagagtctggagaaccagattggagagaaaatgatgaaaataatgatacacaaaattcaaagaagaaactatttaaaggtacaggattttcattaggttcaattgagaatgaaattaattcaaaaactgtaattgatccagaatcagccaatgaagttaataaacctggtaaagttacaagaacaattacattttggaaggaaggttttaatgttgatgatggtgaattatataaatatgatgatccacaaaatcaatcatatttaaaacaacttaatatgggtagagctccattaagtttattaaatgttcaaatgtttcaagatgttgatgttaatgttgttaaaaaattagatgatagttattatgataatcaaaaatcaaaacctagagtattcggatttcaaggtactggtaatagattaggatctccagttcctggtgaaccaatagctgttgaagaaagtaataataataatacaacaactactactagtattacagaaccaactaaacctatagaggaagaacaaattggtgatactagtattcaaataagattagcatcaggtgaaagaattgttcgaaaatttaattcaactgatttagttgaagaaatttataaatttattgaaaataaaactgttgattcaaatagatcatggggggttgtaacatcattcccaccacaaccattagatgaaaagaaaaatttaagtattgcagaagcaggtttaaagaattctgttgttattcaaaaatggttgtagtagtatctagttgtataattttttttaattaataataataataataataataataacctagattgatgtacttattacaaactacaatttacaagtttttttttgaagccgatgttgaaatcccattatatttatataaagatagaaaaaataaataaattaaaagataaaattaaaaatacaagtaattttgtttttgagtgatattatttttattgtttttgtttttgtttattgtttgaaatttgttcgtttatcataaccagtatgacattaatgttgaataaatgtcatatcatcaaaataattagtaaaaatctagttaaaaattaaattaatgacatacttagttagagtacttttctctatagtactttgcagcttcaaccatattagttaatgaagctctagtttcttcccaacctctagtctttaaaccacaatctgggttaacccagaatttatctgctggataaacctttaagatttcaccaattctagcaacaaattcttcctttgatggaattcttggtgaatgaatatcaaataaaccaagaccaatatgatttggataattggagaattcttgaatatagtttggatcatccttctttgagaattcaattgagacaacatcagcatctaaagctttaatatgatttggatctaaatcagaataacagaaatgagagtgaatttgagtagaatcttcaacagcagaagttgcaattctaaatgattctgcagcccaatttaagtaatctgatctttcagcacctgctcttaatggtaaaccttctctaatagctggttcatcaacttgaataacagtaatacctgctttttctaaatctgcaacttcatctcttaaagctaaagataattgatatgattgaactttttgagtaacatcatctcttgggaatgaccatcttaaaatagtaactggaccagttaacatacccttcattggttttttagttaatgattgtgcataaacagattctttaacagtcattgcagctggtctatcaacatcaccaacaataataggtggtctaacatatcttgaaccataagattgaacccaaccattagtagtgaaagcgaaaccatttaatttttcaccgaaatattgaaccatatcatttctttctggttcaccatgaactaaaacatctaaaccaatttcttcttggaatttaacaactaattccatttcagcattaatgaatttttcatattcttcagcagtaatttcacctttattaaatttatttctattaattctaatttccttagtttgagggaatgaaccaatagtagtagttgggaaaactggtaaattatatttagccttttgagaaactaatctagttgggaaatcagatggtctctttgccattgaaggatcttctaaagcagaagcagttctctttctaacttctgggttattagtaattttagattcttttcttgatttaattgcagcagcattagcttctaattcagcagtaacatcatcaccattgattgctttagagataacaacaacttcattaactttttgagtagcaaatgagaaccaatttttaacttcttcatttaatttcttttcattatttaaatcaacaggagtatgtaataatgaagaagaagttgcaactctaactctttcattaccaactttagcaattgctttcttaacaaattcaattgaattttcaaaattatttttccaaatatttctaccatcaacaataccaacagataaagtttgttcaggagttaaaatttcaacaacttcatcaaattgttcaggagttctaacaaaatcaaaatggaaacctgcaactggtaatgatttaattgattcaatatttggtctaacatcaccgaaataagatgctaaaacaatttttggtaaaccttcagtttcagagatagttttataagcagtttggaaagctttttgaacattttctggtaaatctaaaactaaagttggttcatcaatttgaacttcctttgcaccagcatcagctaatttctttaaaatttcaacatataaaggtaataatttttctaataaagtaattggttctaaatcaagtgaatctttatcagatttacctaagaataaataagagactggaccaactaaaacaggtctagtttcaatacctaatgcctttgcttctaaatattcatcaactggtttttgaccatttaatttaaattcagttgaattagagaaagttggtctaacataatgataattagcatcaaaccatttaaccatttctaaagctggaacatcaactgccttagtagtttcagttgcctttctttgtaaacctcttgccattgcaaagaaagtatctaaagttgataattcatatttagtatatctatctgggataacattaaataagatagataaatctaaaacttgatcataaaatgagaaatcatttgaaggaatgatatcaacacctgcttctttttgtaatttccagttcttttctctgatatctttaccaacttttaataaatcatcagctgaaattttacctgcccaataagcttcggtatttttctttaattctctgaatgcaccaattcttgggaaacctaagacggatgaagaaaccattgttaattaattaatagatagttttctactgaaaggagagaacctagaaacagacagaagaatcaaaacaaagtaaaagaagaaaaacctaacaaatgagccataacttcaattcaaaatgtgggaaattgccttcctttataaaccactgaaaaaaaaaaaacgtcaaattttttcgtccaagtgaaaaatttactattattaaatagctgagaatgtgaaaaattactcattatggcagaattgccaatttgggtaattatcggcgggtaatacacatttattggtatctaatacaacttcaactctttggttatttgatcaatcactgctcgtggtgctggtcctaaccctaacactgttgcactgccactagctatctctgttctacctgcatcaattactaaataattggtaatattaagactaattcccttcattaataattcttcaatctcttcaatatctttacttcttaaaacaatcttggcacatcccccttcttcccacctatctaacatatacctattactctcacttatctgtttatataatgatactgctgcatgtgaacattgtgctgcaactttacctggtgacatatttaaatcttccctcactatcattaccatccttacctctcctggtacataattattctccttactattcacttcaattccttccatctttctttcaatcttctatactaaacctatattttaaccttaattaacacaattcaaccccccctgaatttactaatttaattcaaatataataaccaattttaattaattttccactattacacagcctagatcatgtgaattttgacttctgatttctatacgatcgtataatttctatacgatcaaatcctcttagcatgcacataaactctattatcaatatctatctacaaatctataaatctacatgtttaatcatcatttcaagacaatcttatcctcaattgcatcaattgtaactatcttagaacatattatcctatctccaatagtaatcttattatttaattccatatctaattcaacttcaatatctttatcaacccaatatccaattatacgttctttctcaatcttaataacaatacatctcattaacgtaaattcattatctttattaatattagtgccatcactaattatattcttatcattctcttctttttcaatatttttcaatatctcaaatctattaaatttattaataatttcaatataaccttcactttgtgaaacacatttattaaaatgttcttcagtaactttttcaagtctattaggatcccatttaatatctatattattatcctttaatttcccaattgtttcaataattaaatatctaaacaattgccataaatttaaatgtgtttccataaaattatataatgtaaatgatgaataatattttaaccccagtggtaaatatcctttttgtatcatactattattgttattgttaaaattaccatcaatactcatatttctattacttatttgaacttcacatttacctaaaaatgataaacatccaactaatgcagttaaatctcctggatttgaacttaattgaaatccaaatgtttcatatgaatttgcataccatttgaaaattttaaattttttgaaaattctataatcaattgaattattaataatcttatttaaacttctattaattacactaatctttttatcattacaaaatcttgataaattttcatcaataactaacctcaaattatcaattatccattttttatccttaaaaatattctcatcatattgatcattatcattcaaatgtttatgatttatttctctattattaatattatctgtaaaatatcttaaattatcatcatttttatcaaaattcttataagttttcaaatatcctaatcttatcctagatttttccttttcaattaaaaaatttaataatttatttaatgataaccaacaattcatttttcttttagatccatttaaattcattacatttctattaacaaaccattcatcatcagccttttccatagttttgaaacaatcaataccaactttaatttttggattagttaatgaattagaatcaattaaattatgtatgaaggataatttaatacatggttgattgattctaattgaatgattgaaaaagttgattttagggaatgaatccaaattacctttagtatctttatttaaattaattggttcctgtgttgttataaaattatttggtgattgatcaggtataggaataaatatattaaatttatacattgtcattgataaataatcgacagagaatgcaatattatcatctaatttgtaaattgtacgatttttaggaatttcaattggttctgtataattatcattatctgtatcaccctgtatataattgacatctaaagtattattatcatttaagttatttttatcatgatttatattttcatcattccaaattattggtaatgatttattaatatatttaataaatgaatctgaaaaatttctatttctaaacttattcttttcattggtttcagtgatttcatcagttttattaatctcatcaatattatcattttcaatcaatttcaatggtttaaatgatcttaaatgttttggtaatagatcatttaacatatttttattaaaagaatattgtaattcatttatattttcaattactaaagatatatcattgatatttttaatattaaaaccataaataccacttgaaagtattggatttgtatttaaattataaataccaatctctattaaataattatataaaactcttgcattaatctcttcttcaattggtaataaattagataatttattgaaaattttatcatttgggtaaataattgaatatcttattaataatattaatcttttaaaattttcatcactcttataaatattaaataattggaaattatttgattttttcaatatatcataataagctctatttattaaatcattatgttgaatgtaaatgttttctaaattttgtgataataaaattggattgagaaaataatttgaagttaattgatttaaaggattgagattattattataattattattattattattgatattataattgtttaaaaatctgaaatgaattggatcattataaattaagaaatgaactgataataataatgaatgtataccaaatggattaattttaatattagttaaattttgaattgttttagaatttgcatataattgatttgtaaaattaattaaatttagagatgattgataattaatttcagcatttttaaaataatttgttcttattaaatccaattgaagtagtttatttgaaatttcaatgaaaaataataggaaaatatttaatgttaaagttagatgaattaaattagttttagagaattgaaaattaatatcatttctattggtattttttagtaaaattttcatttcactcttatttataaattcatcaattaagaaaattatatttgaagaatcaatttcaattatattaccattaggtaagagtacatttaattttataaaatttgataaactataattaatatcatttaatacaattccaaaattagtgtctaaattgttatttttattgttaataattttaaaatgaatgaaagaacctgatttaggtattaaatttggaatataatttcgtattgatttaatatgattaattgtatttgagaaatcaatttgatttttttgagaattattattattaatattattaatattatttaattcattttgaagtttaataatattttgatgatataaatttgaatgaatgttaaaagaataatttaagggagtaaatattttattattattattatcattattataatgaatatgacgacgataatgaatattataatttttatatcgtacaaaatttttcaaaatggaacaagtgtacctattagacaagaatattatcattgtcaatgtgttagtatgtgtgttttcagatagagactattgaataacttatttgatgttgaatatattcatgctaaatatatttgaaaatatatgatattaatgattatgtaattctacaagaaaaaaaaaagattattacgtaaagtaaagtgagtcaagtattagattctattacttatacttatacttacccagttatttaacataatagttactcatctgattaaaagaaagagatcataaaagcaaataaagaagaagaagaagtggtatgtaaatgtaataaattaaatttgccacccaatttgccacccaatttaattattataattattataattgcccctttcctaaaagagtaattaattaaaaatgcttacctaattctaaaaaagcttacataatcacaaaaacattacgtaatcaataagagtgattacgtaatcacataacattacgtaatccacatcggaaaatcacacctaccaatccactccaaatttccggaaagagaatttttttcttcccactagtgaaaatttttccttcctcccctatcactttcactatcatcgttttttttctctctctgagtctcttctatttcgcctccacattgtatacattgcttgttttccaattgtttttattttcttaattttcttattttaatttaaaatttttttctttcttttaaaaattttatatatttaatataacataccacatatataataacaaataataaataacataataatataattaaatatgggacagattttatcacatcctaaaactgaaaaatcatctgaagaaggtggtgatgaattagttgcttatggtttatcttgtatgcaaggttggcgtgtttcaatggaagattctcattcaactatacttaatatgagtaaattatcatcatcatcatcaaatacttctcataattctttctttgcagtttatgatggtcatggtggtgaaaaagttgctattttcactggtgaaaatttaccaaaaattttatctaaaaatgaaaattataaaattggtaattataataaatctttaaaagatactttccttcaaactgatattgaaatcttaaatgataatgaattatcaaaagatccttcaggttgtgctgcaacttcaactttaattacaaatgataaaatttattgtgcaaatgcaggtgattcaagatgtgtactttcaattaatggtattgttaaacctttaagttttgatcataaaccaactaatgaaggtgaaaaaaatagaattgttaatgctggtggtttcgttgatatgggtagagttaatggtaatctggctttatcaagaggtataggagattttgaatttaaagattctaaaaatttacctgcagaggaacaagcagttactgcattacctgatattttagaacacaatttaaataaattaaatgatgaatttataattttagcttgtgatggtatttgggattgtcttacatctcaacaatctgttgattttgttagaagatatattaaagaaaaaaaatctttaattgaaatttgtgaattaatgatgaatacttgtttagctccaacaactggtggatctggtattggttgtgataatatgtctgtttgtattgttgctttattaaataataatgaatcattaaatcaatggtatgatagaatttcattaaaaatttcagatgatgatttaaaaaatttaccaactgctgatgaattatcaattgatttatataaaattgatattgaaagtaaattatctgaaaataaagttgatgaaaagggtaataaaggtataacaactaagaaaaatagagttaatgatgaagatgatgatgaagatgatgaagataatgatgatttattaaaaggtggtgcaccagcatttttacaacaattattagctgcatctgctgcttcacgtggaactggtgaaaatagtaatgttatatatttagatccatcatcaacttcaattttacaatcattaggtgttatggaagataatgatgatattactcatgaaattgaacaagaggaagatgaagatgaagaagaaactgaagaagataataaaattgttgaagtttctgatgataaataattgattatatcaagtatatgatcattcaataataataataataataataataataataataataataaatttcttagtgtatattataatgataatcaaatgtttatcatattttatttcttaaatattctcattctgtgtttgtcaacttctttctttcatattcatattcatattcatattcatgttcattcttccaaatcaagttcatatttcatattgcaatttcaattttaaattcatattcatattcatgtattaatataatctataaattcatgtttcatgttctgcaatgtttagtttcctattttctattttctattttctattttccattttctatttctatctccatactaatttccttttcttttcgtttgtaatgcgtttcaaaatctttttttcatataatatatttagattattcaatactaataagtatattaaaataatactattaaaatttttttctatcaaagcattttataaaaaaaaactacgttctctctattgtatctatttcaccgaaaacttccatactatttttataacaattatcaattaaaatttcaggttcaattgctaatatttttgaaacaacttctgcaactaaaccaatcaaacaaggttcatttcttgatttaattaatggagtttcattaaataattccatatattgaaatttatcaaatttatcatgtttaataattggtattggtaaaaattcaaataatgtcaaagaaggagattttttcgattgttgtgttaggacttgatttattttattatttgatgtgatcttctcataattttcataatcagagggataaaatttattaggtgattttgttaaaaatttataagatggatgagttttcttaatttcacaccaaggtgaatcagtttcaatcattaatctattaattggtattaaatgtaatgaatcaattgttgattgatcacgtaaacttgcaccattaatactaatgaaaattttataatcatttttctctaaatcaaggagttttatcagttcatttgaatcacctgtaaatgaatgaattagtaaatttttattttttaatttattattttcaataaaaggtttaattattttaataaaatcatcaactgctgatctcatatgtaaaaataatggtaaattaaatttagttgctaattctaattgaatttgaaaatattttaattgtttatccattggtgtataatgtaatctatcataatctaaaccaatttcaccgaaagctttaacaatatttaattttaaaccttcaataattaaattttctaaattttgtaaatgtttttcaataatagtattttcattttcaaattctaatacagtacaaggatgaacaccaacagttgaataaaggttaggtatatcaatattatcatcatttcttaatttcttaactatatcaattgtattctttgattcaattaatgatgaaccagttaataaaatatcattaacatgatgaattaatgatttttttaaaacattaataatatcattttgattatattttttaccatgataataaccatcaaacattttatcagtaatattaacacctacatcgaaatatttaggtatataatcagaagttgcctcttttgatattgataaggttgataatgattttgataataataatgattgagatgatgtcattttactgataatcaatttgctcattaatttataaatataattataataataaaatcaatttcgatgatcccgagatgagtaaacaaataccagacagaaaaactgacgaatcatcaactttgcaaaaagaaacgagtggctagaaaacagattgatgcacccgacgaataaacccgagctaaggcgctagtccaaaaaaaaaattttgaaaaagttggcagaaaaagtgcgggccgtgccgacggaattggcaaattgcaagaatagcgaaaatagcgagattagcgtttaaaagcgaagagagaagagctgccctgtcaaaaattggaaaatttaagctctttagcatagcaaattattcaaatttatattttattggctattgattatcattatcattatcgtatcgtatctgatcgtatcaatagatatgcatctcgtctttttttttttgttaatgtcctatatattaaattaaattaattattataaaaaagaaaactgaaaactgaaatcagaaaaaaagaaccaaaagtgtaaacgtgatgtaaagcagattaatgagtgtatgtattagtaaaggtatagtatataatttgtgtatcaaacactgttataatatagtttattgattaataaatgaataaacttgtgaaagtgatggtaatttattaccacttggtgtagttattgaattaataaagaaatgattattagaaattggtgttgtattaccagtacttgtaccagtactaatttttttatcatcatttaatgatggaagtacaattgctgatgtttgataaactgaaaatggttgttgttgctgctgttgttgttgttgtggataatatggtttattactatttggaaaagtataagtatcaatttcactttcaggtgtatttgaacaagtatttgataaatttggtatttcatcattacaaatattagtattgtcaattaataatgatgaaatacttaattttttacgttctaaaaacataattctatttttaatttcattaattgttttctttggtaataaaattgataattcaactgttgataaatttttagaatttcttgatctaattaaattatcctcttctaatgtccaatataagttattattattattattattattattattattattattagtgttaagaattaaaggatttttaatatcattatttatagccgtactattattattgtttagaattctattagagattgaaatttctgaatttgattcataatcactctctttattatcaatatttgataaattttttaaattaattgtagtattcttagaaattttctttaattgaccacttttcaaacgacgccatctaaattgacaagcatttgaagttctattattaaaatatttagcaatttgtttccaacctaaatgttgaatttcctttaattgaattaataatttatcatcattatcatcccaagattgtggagaatttttaattttaatactattatttgaagtatttgcagatgatgaatctgtattgtatataatattattttccatagtgtacgatatttgataataataatcaaaagaagaataaatttaataagataatgaaaaagagatgagaagagaacaattattaagagaaatgaaaatttgagggaatagttaaagtatttaaatgacaaacaaaagaagtattaatgttttaatattgataaaaaaattgatatgattgataaactattatgatgtaaattaattaatgacaagttaatgaatgagatgcaaatcaaattacaattaacaataaataaattaaaataaacgtaaagacctcttcctcatacggtgtttagaagggttctgctatcggaactttcccttgattattccattcttgtttcatttcattccattctgatttgctatttctctttctctttatttttatgtttatgttttactattattaatatacactatagttacatagatctactatattctttactatattatactacaagagtcagtattctaccaatatatcaaagaataatttccaaacatgtgaaatgtgaaaataaaataaaataaaataaaataataaaacgggaagtcaattccgacaatcaatgcgatgacgcttattttaaaccgtcggaacttccgtatacgctagtttaacgcttccgtcattttaaattttaaatttctttttctttttctttagtgctagtactaaactttaaaagccacactatcgatgatcatctcttagtataataccttattttattttattttattttataccccctcccctctttattagtggacttccatttcctaatagggcaatcattctcctcactattacgatattaatttatcaacaatttcaataaacatatcaggtataagaacaatacctgatctaccaaatgataaataactcatctctttaatattctccctaattaatcttgatgcaatacctgatgcaataccttttaaatctaatggtaatttctttaaatcaattataattggataataataatcttcatctaatgatccaattaaattcttattactataatttaatttattcttatcatttttattaaatggtattaataatccaatttcttcagttggagttctagttattgcaaaatattccgggaatgtcctattattattattattattattattatcactaaatttctcggtatttaatttagatatattctctgctgtttgttttaatatttcaagtgaatctccaattcttgcacccgttaatgttaatttaacattagtatctaattttggtttaatattattattatttaataattcaaatgtcttattctctaattcaatttgtttcccattgtcttcatcattattattatccttcttcttttcatttaatatattaattaccaattctttatcctttattggaactaaaactaaatctgaaaaataattacttataaagaataatgttatattatttaatgataatggttgggtaatttctaatattttttcaccaatatttaatccatcactgaaaacttgaataatgaaaaattcatcattaattaaaattgattctttatctaatttaattgcattagataaatattttttaattaatttactacaacacattaatgtaacttcctctgatgtaaatgctaaatggaaaaataattcatcatcaatttcatcttcattatcactattattattattactcatatcactattactatcatttgatctcaatgatgatgaatcattatcggaatatcgtgaatttgatctatcatcatatgactccgcaattaaataaattatctctaatataccagatttgaaaatccaaaaattctctctaggtatagtaagaatacttatcttactgttaaacagttgtgtctcgttactatcaatcattgtcttaagaaagaagtgtctgtgatctagtatactttcaaatacaaaactacttatcacaatttaaacaaaataaaattcatgtagttcctcaattagtcataataataataatagtaatagtcatactgaaaaataaataattttgaataaaatttttcattacgtaattatttttcataaatttttttgaaaccgttatctaacacggggctcaacacctatattataaccattcatcacatcatcctctgctaagtttcacatctgattccactctatacgatatgatctatatataaaagagtagtattcccttctaaattcattatcttaactacatttttcttatacaatgactaatagtaataaaacaagtacaaaatctaaattcttaagattctttaaaaagaaaacaagtttgaaaccactagaaataccatctccattacctactgctatacatcctcctccaaatcctttaacattaaatataaaatcctcatatagagattttgttaataatatggataatccatttattgatccaaatagtgaacttaataacaataataattcattcccaattttcaatgatagtaaaaataaattaaacagatcaaaatctgttaaaggtaaaatatcatcacttaagaggaaacattcattcaagttaaatagaacaacaacaaaagatactcacacagataatgaatcttatactgatatttataatagtttatttggtgattattcatataatagttccaacacatcaattgtttcaaataaagagaatatcttaccacattcatatgaattatcagaatcgaaaactccaaattattcaattacaccatcaactcccaaacttcaatcaagtccagtatttgttaataattttaattttattaaaccaccacatgaagttatactttctcaaattaatgaaaataagaaaaatgaaactaaaataaaatttattaatccaaattcaatgaaaaaattatcaattcaatcacctcatcctcttagatcattacctaaaactccaatatctaatggtcaatttaataatccaatttattcttcaagtacattaaaatcttataatgatttaataactgaagaatttaatgataatgaactactagaggagaaaagtttattcgatgcattaagtaatgttgaatggtgggattgttcaaaaataagtttggtacaatataatgattcaaacaactaaacttcatcatcatcaacctcatcatcttcctcttcttcctcttcatcatcatattcctcttcttcaccatcataatcgttatcatcttcatctgattcttcatcattcggttcatcaattatttcttcttccccctcttcttcaaatatatcacttatattaacaacttctatattactttgctttccatttataccattatttatttcctttatatttattaaatctgtattcttatcaattttttccttaatttgatttggattcgaaacttttttcaaacttttaataccggggaaacataatctataatcattcaattcatcatcattttcaatactattttctttattttgatctaaaattttttccattgtttgatcttctaaatctctatcatcctctaaatcatcctttaaaaaattaacaataactgatatatttttcattaaattaacactcatattagtattaatcatattttcattttgatcagttaaaaccatagttgaatttgtatttatacctcctgatggtcctaatataataggtttccaaatgagataatccttattcaattttattgtatctcttttcataaatgatgtataaatctccttaactaatgaataattgaaaatcagtgcatatttattaatatcatcatctttatttactgttatcaaagaatttaattgttcaagaccaacaatcacatcatcgtgtgccatacctgttaaatttgataaatcatcaattgataagtaaagtttctttaaattattcttattatcaacatttttgatcaaagtatcactattttcataaaaaaatttataaatttctttaatgatggaaatcttccaataatttctataacttaataaacctaaatgacttaaaggtttctcaggtgtacctaatttaaattctctcttggataataaataactaaaatcaattaaaaaattcccaaatcctcttctttgataaattggtaatgtcataatacatgataaattatatccagttgaatttaatttttcctttgaaaaatatccaacaaatttaaaattttcatcattagagaattcatataatacatagaaaataaatggttcaacatcataatataaagttttagaattaagaaataatttggctaacaaacataaattttgacaaaaaataacatttttcctaccatcaatttcaaaaattgaaactttttcattattatctctataaatttctctaccgttcggatgtctctttgatgaacatttaattgaatgtctatttaatgtaaatgatgaattaaaatataataaacaatgaggacatatatacattattgaatttgaattgaattcagttggatacggagatttataccatggttgaatttcataattatcaaaatgaattacttttaatttattacttgaattaggtatactatttgaactgttattaccgttattattattatcattaatttcaatgagtttattctgggaatgttttagtttaatcttattggattgtaaaataaacttattgtaaagtttcgtaaaatttttatcaggatttgtatcataagtattggcatcatcaaaatcaaataatcccctataaggcagttctaatagaactgattcaaccttagggtatgataatgacttgttctgtaaattacctgtattggatgatgtggaaactggtatcgagactgatcgtttacgtttcctttgattagatttattgtttacattaatttccttatcagttgatgaattatcaattatatcaatagaatctatatcaagtgcaatattgatatctgatttggataatgactggtgtctgcgctgtggtttagaggatctacctatcattatcagagtaatctgctaaaagaagagtgatagaaataaaattgatatataaataaaagattaatttcctaattcgtcaaagttaacattttttcatgtcaacgttttgttaaatctaaaggaaatctcttcttttctatggacaatgagtgaagactacgacaagggacgtccaagggagatattccattattcatgtaccgatgaggagttatcatttgattataaacaattaccaacatatactttaaatgaaaatttaaaacctggacttcttaaaaatggtaaaaaacgtccaatgttaggattaaagggtggatttaccgattataaacctaaagcattaaccgaaaaacaatcaaagataggaattttactattggccttactagtatatgaaaaaattaacaaaataaataatcctgttgaagaatcgattgataagaaagatattagcacataatgatatattcataagtttaatattaaatctaaatcgatttttcaatattatattatacaagggtaaaatgatttttgccaaaacaggtacaaagaataagcccgtaaaaatttattcatatattggacataaatttgtggcaactgtttgtaaaactgataatccaagagatttatcatattttaaattattattagaaggtaaatatggagattggaaatataaatcagttgctagagttaatggatttaaacaacattatatttgggaaaaggagaaagcaattgatgattttccttcaaatgaaagattcaaaaggtatactgagataaggttatgttatatacacgatgattccaagtttaatgaattagatgatataaaaagtaaaaaagaatttttagaatttgttgatgcaaatgctaaatcttttgagtctaaactaagcaaatggttatttaaaggttatttcagtagacaagatatattagttattggacttagagatgaaaagatgatgcttaagtgctatgaagaaattagcatagagtacgagttacttccatttattaaggaacattatcatgatttgtataatttattcatcaatagggaaagtatattaaatgatgcattcaataagatatatgatagtatgattgcattgagaaaacacgagaaggatgtttttgtggttaataccaagacattagaagttaaaaaagttgaagaaggaaatggagaagggggaaatgaattgttcaatgatatattgatagaggaatataggagtaaaatagagaaaaatgaagatatattagatcaatgttcaatcattgaccacgaacaattggaagaattgagaatgaaaaccattactgataaaatggatagacttgcagtgtccaatgatgaccataattaatgcaaaattttgtaaagtttctattagatatatgtatttgcaccattacaaccaaataacttcttataaggcaattctaataaaactgttgctatcttaaactatacggcactttttgtaacttaccagtatacaaaaaatcgataacatttcctaattcgtcacaaagtcaacatttttttcatgtcatcagttttgtttgatctttttctttagactttttctttttattgatggtaaagagacaataaaaggacaatgagtgaagactaccacaagggacgtccgagggaaatattccggtattcatgtactggtgaaaagttgtcgtttgattacagagaattacatacttattatttaactgaaaatttaagacctggacctcctaagaatggtaattcacgtccaatattaggattgaaaggaggaattgggaattataatcgtaaagtgtttactgagaaagaatcaaagataaggttgtttttattaactctgttggtatatgaaagtctcaataatgtaagttatcctattaatgatatgattgaaaagaaagatattgagatattaacgcataatggtatattcacagatataatatcaaaatcatttgaagtttacaatattatattattcaaaggtaaaatgatatttgccaatacagcaacaagggcaaatcagaataaactttattcatatattggagttaaatttgaaagtattgtttgtaggactaatgatccaatagattcatcacattgtaaactacttttaaagggaaaatatggagaatggagatttaaatcagttgttgaaattgatggatttaagagatatccaagaaaaaaggagaaaaaaattgaagaatttcaattaaaggaaagagctcaaatgtatacggaaatgaaactatgttgtatatccgatgattctaaacttattgaagtggataatataaagaataagagagagtttattgaatttttagctaaaaatgtcaaaacttttagacttaaagttaaaaaatggttgtttcagagttattttggtagacaagatatattaattattggaattagaaatgacaatatgaagcttgtatgttatgaagagattagtttgaagaatgatttacttccatatattaaaaagcattataaaaacttatatgaatcatttgttaatagagaacgtatattaaatgatgcatttaataaaatatatgatcagatcatggaatcaagagaaaacgagaaggatgtatttgtggtcaataccaagacattagaagttaagaaagttgaagaaggaaatggagaagggggaaatgaattgttcaatgatatattgatagaggaatatagaagcaaaatagagaaaaatgaagatatattagatcaatgttcaatcattgatcatgagcaattggaagaattgagaatgcaaaccattactgataaaatggatagacttgcagtgtccaatgatgaccataattaatgcaaaattttgtaaaatttatattagtatttgtatatcataaacgtatttacaccattacaaccaaataattcaccataaggcaattctagtaaaactgaagctggctatgtatgaaaaagtgcaagtattgatgatgggggcagtgaaataaattctataatattctctaattcgtcaaagtcaatattttttcatgtcgacgttttgttcaatctttttctgttgacttgttctatttaccgatcatacagagacaataaaaggacaacgagtgaagactacgacaagggacgcccaaaggagatattttgttattcattcaatgatgggaagttatcatttgattatagagaattaccgacgtatagtttaactagaagtttaagaccaggacctgttgaaaatggtagaaaacgtccacaattgggattaaagaaggggattgaaaattatcgtcgtccaacatatacggttaaagaatcaaagatacgactacttttattgacattactagcatatcaaagtcttaataaaataagtaatccaattagggatattgtaaataaggaagatattgaaatatttgcacataatggtatatttacagatataatggtaaaatcatatgaagtttataatattatattatttagaggtaagatgataattgcaaatactgcaactagaattaatcaaaataatttatattcatatattggacataaatttgagtctattgtttgcaggactgaagatccaaaaggttcaccacattataaattattattagaaggtaaatatggtgaatggaaattcaagacagttgttgaaattgatggatttaagaaatatcatagtgaaaaggatatgactattgatgatttcccattaaaagagagactaaataggtttacagagatgaaattatgtagtgtaaatgatgatgcccaacttgaaagaatcaatagaataaggtataagaaagagtttgttgaatttatagctagatattctaaatcttttaagcacaaaatcaagaaatggttatttcaaagttattttggtagacaagatatattagtcattggacttagaaccgaaaacatgaaacttgtatgctatgaggagattagtttacagtatcatttacttccatatattaaagaacattataaatatttatatgaatcatttattaatagagaaagtattttgaatgaagcttttaataaaatatatgatcagattatagaattgagaaatgatgaaaaagatgtatttattcttgatactagggcattagaagttaagaaagttgaagaaggaaatggagacggagataatgagctatttaataatatgttaattgaggaatataggagtaaaatagaaaagaatgaagatatattagatcaatgtccaatgattaaccatgaacaatttaatgagttgaaaatgaaagccatgactgataaaatgaatgaacttgcagtgtccaatgatgacgataattaagctggttttacaattattgacacagattaactatttatgtatattcgattgtgaaattaacttattgaaaagtttgtgaagaattttaacacgatttgtacatataatataagtatttgcactgttaaaactaaataatcttttaacagacatttccaataaaactgaagctacatacatatgattaagtactgatactaatactaatcgcttgttgataaataaaatcgataatatttcctaattcgtcagaatcgttgttttttcatgtcgaatttttgttcattaagagaaggctcagtttctttttgtatcttttttcttttaaatacagacaataatggaagactacaacaagggacgtccaaaggaaatatttcgatactcatgtagcgatgaagagctatcatttgattacagagaattaccttcctattgtttaaatgaaaatttaagacctggacctctaaaatatggtaaaaaacgtccaatattaggattgaaaggagggattggtaaatataatcgtaaagtgtttactgagaaagaatcaaagataaggatgtttttattgacgttgctggtatatgaaagtatcaataatgtaagttattctactaaggatacgatagataagaaagagattgaaatattagcacataatggtttattcacagatataatatcaaagtcatttgaagtttacaatattatattattcaaaggtaaaatgatatttgccaatacagcaacaagggcaaatcagaataaactttattcatatattggagttaaatttgaaagtattgtttgtaggactaatgatccaatagattcatcacattgtaaactattgctagatggaaaatttggagaatggagatttaagtcagttgctgaaattgatggtttcaggagaaataaaggggagcaaagaattgatgatttttcaataaaggaaagggctcaaaggtatactgagatgaaactttgttgtatatccgatgattccaagattattgaagtggataatataaggagtaagaaagaatttatagaatttttagctaaaaatgtcaaatcttttagacttaaagtcaaaaaatggttgtttcagagttattttagtagagaggatattttagttattggaattagggatggaaatgtgaagcttatatgttatgaagagatcagtatagaatatgatttaattccatatattaaggaacattatgatgaattgtataatttattcatcaatagggaaagtacattgaatgatgcatttaataagatatatgatggtatgattgcattaagagaacatgagaaggatgtatttaccctcaatactaagacattagaagttaagaaagttgaaaaaggaaatggatatggaggaaatgaattgttcaatgatatattaattgaggaatataggattaaaattgagaagaataaagatatattgaaacaatgttcaataattaaccaagaacagttcaatgaactgaaaatgaaatcaatgattgatgaaatggataaacttatacaatttctaaaggtgtaggaaatagttgagtgatttaagacataataatatattataggagataacctataggaatgtttcggagatattacgtaactgtattaatagaagtgtattaatagatagatctatcgatatatcaaccaattaaccactactgtgactatttgcgtgtaatacagtagactcaataaatagtatagagtatcatacacagatagattgagataccaataggaaataaaggaaataagaaggatatataagttaataactcaatgccatcagtatatccgtttatacccgtctcttttcttcttcttaaagtactttctttctccatttctctcttcttcttacacattacaggtaaaagatacccacagtagatcatacactactacgtcttctactctgttacttcactatacacgtatactctgtgtataaacatcccaggacattggaaataccacccatttcataggcgggcgttaagataataaaataaatataatacaaggtaaattcccgaagagcaaaaattatccccacgcaaaatacttaacatctttaataaatacttctttatcaactgattagtaatttattattttattatattctcaataaacatcatggattcagatagatataaatcagaggagattaacgactctcttatctctcaattcttagatcctggtgtatcaaatggtgatgtcgattggttattccgtggtagagaagttaaaaaattaactaaacattcaaatacaattaataatgaagttcaatctcaattattacaagctcaacataaagctctattacaggctaaggagaaagagaaagaaaaggagaaggagaaagaacgtgaaattaattcttcaagtacaaatactagttcaatcagtttacaaaacttaaatgatcaatcatcatcatcggatttaatgactaattctaacagtactacatctatgaataatatagcaaataatcactctcactctcactctcataattcatctcccttaatgataccacttaaacaatctgatgtacctctgaaatcttcattaaaatcttcatcaatgtcgtcatcatctactgcaacgcgtggtttgaaaattgatacatctattttaacaaataattctccagtgaatttaaattcaccaataaatgatccaaaatctagtacatttccaacatcttcatcagttaattctaatcataatagtaatattaataatattaataataatatacaaaatacaaaattatcatcaacaccaaaagaatctcaatctcaatcttcatcaaatccaacttccacagtatcaacacctgtaaatagatcaagatcatcttcattgtttagtcgtcaaaaagttacctctactccaacagattcaaaaccagttaaaaaatctttattatcttcattatcttcaaaattgaaaggttcaaataatgtatcaaattcaatattaagtcctcaacctacatcacctgtaattaaatcaccattagttaaacctcaaacacccgtcaatagaacttcaacaccaccacaaccaccaccacctactaaaccatctccaacagttactaaaccaacaacttacccaactcaatcaatatcaatacctaatgaacctataaataatcatcctaaccctacttttgataatgaattaaataatttaatatttaaacgtgtttgctttgcacttgataaattaactgaagatcctcaacaacaaattccttcaagaagacctaaaaagggtgatgttttaatacctgaagatatgttagctccacctccaaaactttcaattggtataacaaatagtttcaatgaacaaacaaaggatcaaaaacctaatgttgatccaaaattatatgatgatgcagttatgagacataaatattttcaacaagaatcaatgaaacatgccaaagaagctcatattgctgcaatgagaatggcaaatgaggtttcatcatttaagaaacgtaaaaattcattacttaaatttggtgattctcataatgctagtgaagatgatgatgatgaagaagatgatgatgatggagaattctcaaaatttggtaataatgatgatcatctggatattgataccccacttcatgaacatgttaattattttggtagtcatgataatgatgaaagtaatgaaaatgaaaatgaagatgaggatggtaatgataatataaatacaaatactgaaatttcattagaaacactttatacacgttgttgtcatttaagagaaattttaccaatacctgcaacactgaaacaattaaagaataaatcaaaacctttacatgttttaaaaatgcttaatcctaaaccaacattaattgatattttatcattttcagattttttggcaatttcccccattataacagtcatatttgataatgttacaattgatagtgaaatgttgaaaattgttttaattagtttgaaaaattcaactcatcttgaaaaattatcattaagaaatgtaccaattgatcatgaaggttggaaaaatttatgtaaatttttagaaactaataaaaatattcaaaaattagatatttcacaacaacgtctgaaaaaatcaactgatacatcaaaatcaattataagatctgaattaaattgggatttattagttgatacacttaataaaagaggtggtatcgaagaattagttataaatggttgttgcttaaatgttaatcaattcaataatttaattactaaaggattatccctaaagactaaaagattaggtttagcatcatgtcaactagatagtgaaaaattatatttattatctaaatggattgcatcatcaaaatctacatgtattggagttgatttagcatttaatgatttctctcaaggtcaattaacaaaatttaataaagcattaacaaagaagggagaaaggatgaaattacaatttatttcattaaattcaacaaatgttcatttgaatgaatgtattgaattaattaaaaatttatcagttttaccaagtttaagatttttagatttaagtaataatccacaattattcccaaatattttaccaactttaagagattatttaccaaaatttattgatttaagaagaattcatttagattttaatgaattaactgaatctgcagttgttcaattatgtttaattttccaaaattgtttaaaattagttcatgtttcattattaggtaatgtaattacatcaaagtctcaattagcattatattcagctgttaaaaattctcatatttataatattgatatgaattatgataaattagatgatgaattagtttcaaggattgcattttatttgatgagaaatatggaattattccttaattcaactaatgataattttgataatttgagaaagaagaattcgaataaaaatacaaataatgatgataatcatagtgaaaagattagtagagatgaagatttaatttttgatggttcattattaactaaagctgcagaacaattacttgaaaatgatgaaaattttaatggggaagaacgtaatattattcatcattcattagttgaaaagacaattaaattaagaaatgaaattcaaacagttatgaataaattattctcagctagagaggagggtaaattaacaactgaaggtaaagaaaatttattaagattttgtttactcgaagattcacttgaaaatattttagatatatttgctgatgaagttaataatgataataataataatgatagtaataataatagtgatgttactaattcaaataatgataataataataataataataataatgattcaagacctgatatgattagaaaattatcatctcaacttattaaacatcattcaacacaaaatgttttagaaggtgatccaattattcctaatgatgatttctatcaaaataatgatgaattagttccaaatattgcaagtgaggaacctcatattgttgttgaagatgctaatagtgttcctgttgatagtacaactggtaaacgtgttttaattagaaattattcacaaacaagtattcattcaaagaaattagaggaggaagaaggtgaattacatagatgggggttctttgttcaacaacaaaatgatattatgcctgatgattcacaaagtagatctgaatataataattctagttcaccaatagatgatataattaaaagggaaagagaagcagcagcagaggaggaaagaattagagttgaagaagaaaaggctaagattgcattagaggagaaattaaaacttgaaaagaaaacattaaagattaatccaattccatctggatctgaattaagagaaactattatgaaggcaaagggtattgaaagtattaatgatttaattaaaaaagttaataaagattttacaactgttgaaaaaatttataaacatgcagatgctaagagagcaattagtcaagaaactgagaatgttgttgataataagttagccaataatgaatcagtttcatcaccagtttcaccaatttctaataaaattgttgatcaagctaatattagtaatttatcattacatggaatgaatcaagagattaatgatgattataaagttgacgattcattaattgatgaaaatccattatcaccaacattaagtctgaattcatttaaagatgatgaatttactgaacaagctgatgaagtttatgatagaattttaaacaatgttatcagagttcgttcaaataaataattataattaaataaaataacaatacttttctaacatttttataaatacctaatattattatattcatttttttctagttaatatcaactatttttaattctcttttaaatccaaagtataaacttctttgtaaatttttgattgatgaattcaatgaatttaatgtagtatcatcataagttttaagtctattcaataatgacattgatgtagatatatctttatcatttaatggaattaaatcagaatactttacattattattaaataatttagcacccttaattatcatatttgaaacacatggaagacttgtattattattcattggttttaaacaatattctaatgcaatcataaatccataaacatctgaatcaaaatatccatatattttacatttgttaaatttaatagttaatatgttaataaaatgttttgtaagtctatctggataacctcttgcagtaattaatattgaattattgaatttttgagttatatgtttattacttttctctatattaattaaacctgataaaatagcatctttctctaatataattattgaatcaggtgaactattttcattattattgaaaattattttaaaatcagataaagatgaagagaaattaattacaggtataagagttgatccaattgttttagaaattttataattatcaatggatagttcaccataaattaaacctttctgtgaagctattatatgtaatttttcaattgataaattaaatgataatgcaatattatctaaacattcatcaactattgtttgctttttaaataatttaacatctgcatagtataattgtcttttagatattatttcacccttaatgatttaagtatgtatgagtttcaataatcttaaataaaccgtaaatttccaattgatattctcctttaaatttgggaatgttaaaacagatttccttttcaaaattggattaatatgtagttcaagttgaatataatcaccattctttaacccattttcaattatattgagtattttagataagtattccagtaattcattctggatatggttatcattcctgtttaaaatgttagtattagtttatattatatgtaaatctgaggaggctcagctgtattaaaatacactagaaaaattcattcatctgattctcaacatacactctattcaaacaatcttgactaataataacaatacgattagagatcatcctacagttatctattttactgtttaatttccaagaaaatattgtctttacttaattctaaatataaaacaagatgaaaacaaaatttcatgaaaaaaaaatcaaaaaatcaaaaaaaaaaagtttataagctaattattaaacctgataaataacgataaattattaatactaagggataaacaatcaaataatttaagcagaagccttgaattccaagatctttgcttcgactcttgcctttctttcgtctctggtaagtttcttttgtctgtatttctttgattcagcagcatattgagctttcttatcttcagccttaactggagttggatcttctctaattttttcatgtgcttccatgtaaatatcttcaacagcatctgcatcgatatcatcatcaatataagatttgaataataaagaatatctttcttcatcatcatccattaattcttccatatattcagcaacgtgaccaccgaaaatgtattttcttaataattcagcatctaattcttcaccttcaatatcccaacctgggaatcttgatggagaatgtggaacgtataaaccaccatcagaagcaccctttaatgcaccgaaaactttagcaccagttgtagttctttgtaaaccaacatcaaggaaaactttgaatggtcttggagaatcttcaacagcttcagttaattcaaattcaccttcaacttcttcaacaccggtataggtttcatcaagacctaatttctttaaagctcttctagcaactaataaaccagttgcataagcagctgcccagttagttaaaccgtgtttaataccgtaatttggtaattcatgagaatatgcagcagttaaaacaacatcaccagttaaagttgatgaaacaatttgacagataatatctttgttagtgaatctaacaactaatctgtattttggagaagcatatttgttctttgcttgagtgattaatctctttctagcatagtaatcagtcttaccttcagctcttcttctgaaaggagtttggtatctggaaaggtatgcagaatttctggtgaatttaaaacccattttgtttgtttgtctattgagatattctggtagaggaaagattcaaaagaattcaaaaaagaaaccttaaagatattaatacaaatataaaatacaatacaataatactattataatacgaaaagtgaaaaaaaattaaaaaatttgaaaaatttgaaaaatttgcgtggcgttgcccaattgggaaaatagggtttctcgccctgtctctttttcccaatgcggtaattagggtatggatggatatacttatacttatacatactgttgtgtaatacccatttgaaggaaactatccttgctttccatacttgacacgtcaggacaccatctacctgcaaagatacaatgaactgtcatatcaggtccataataaagatcacttaataatttaggtgtaataaggaaatattgtgatgtacccttaattgaattatctgtagctcttttaacaattaattcatgtgctttacgttcatttttagcatccataccttgattaatttcatcaactactcggaatggtgtattagttaatccttgtaatgaattaaggaaaactgctgtagttgtagatttttcaccacctgaatgttgtgctccattaaaatttgttaattcttcattatctctaaaactaacttgaataattaatttccaattagaataatcattatcacttttatctaatttaacattacctgcactggcaatcttattcatattatttccaaaatcttcagatataatttcaacaatcttatctaattcactctcccattctaaaatcatttcccctaattgttcttcacttttcttaatcttttcctcaataattggtatttgaattttatattcttcaatcttaaattcattctcctctaatttctttattgatgtactaccaatatgactatcatttaattccatattagattttaattgtttaattctaccatctaatccttcatgtgtaagtatattctcctctgccatctccttaattatattaccaatttccattatctcttcatcactatatttacttctctccttcttatatgaactaatagattctttataaattgaatctaattccttatatttagcctttaaatgtcgaagttcattttgtttatcctcaatcatacttccaatagatttatgtatattttcaacagattcaactttattaatttcttcaatcttacgtatctctaatctcaataattcattatcattattaactttctcaattgttaactttcttttatcattaccaataatttcaactttctcctttattctttcttcaattatttcatacattttattcttattttcatttgtattactattcttcaatgatttaaataattgcttttgagcttttaatctatcttcttgatattctaaattttgttttaattttttagcccttttcaaaacttcattagatctaataatattatcttcaatggtttcttgttctaaacttttctccttgtattcattatttttttcattataaatggatttttcatctaaaatcaatttctcaacttcaccttgttgatttactaatgaattaatcttttcatgaattctagatttttgttcctctgacataccattaacgaaaattgttgatttaagtctaaatgatctaatattagttgtaacttgtcttctaccaaaacttgatctattcattgtataaatttcatctctactaacatatttaataatatttaatcctttagaaatttcatcactaattatatccttttgttgattagttaaacctttaattgaaactggaattctatgtaaataagtattttcacataacatttgaataacttcttcaggtcctgaaaggaaatctgttacaaatccatcaaatcctaatctaatcatatcttgatgtgaaattctatcattattataattaaatttattaccaattgttctaattgaaaccatacatttacattcatcatataaataattagataatgttgaaaaatcatttctacttggaacaacaactgcatttaaatgttgaaatggaattaatgcttcaactattggtgcaacatttttatcattaacatttaatgtgactaatgcaggttcaaaaaaatttgcatgtaatttagattgtcttaaaagtttaattgctctaagtgtaacttgatattttctactatctaattgattaattctatcagttgaatttaattttttctgttcttcataaatattgtatttaatattttcaatttgatttttatatgcattcattttacttttgatattagtaagtgcatcatcaaattctctaacttcatttttaattgttgaacgtttagatttccattcctcaatctcatcaagatctggagtatctaaaatttcaatttcttcccttattttattacattgttccttaaattttttataatcagctctagcagttaataatttattatcataatctttaatttcagagaaacatttttcaatatctttatcaattttttcaattttagaatcaattttactaaattttgaattaaaatccaattttttattttcacaatctctaattaaatttttaatttcatttaatgattcatcaccaattttcattgcaacttctaaaggttttatattttcataaaataatttatattcttgctttttagtttcatattcttccttacattcatccttttgtcttttcttttcttgataaacaacataagggcgaatcatttcagttttttctaattctttctgtaattttaaaaattgtttatgtttttcaacattttcctttaattcattagacttattttcaagttcaattaaattacttgaaaattcatcaaattttttattctctgaattaataagtttctgtaattcaataattgacatatgattatttaataattcaccatccccataggaacgttcaatttctttcaataattcatcaggttttaaatcagcaaatttagaaactctatcttgaggtaagaattgacaaagattatcaagttgaatattataagattttaatactttctttatttcaccttcattaactgaattttcattaatcatccattgagttttaccatttctaattaattgagttgtaattgtaattgattcagttggataatcatcaaatgcctttaattcaattgaaattgaacttaaattttgattatcctttataaaattatcagttgacattgattctttacctaaattagctaatttcccaccaagaccaatacatatagcacatacaactgttgatttaccactaccattaggaccaataattaaattcatctttggaccaaaatgaaattctgttaaattatatgacataaaattagaaagtttacatctaatgattgatcctggttgaaaagatgcataatttggaacaaatgacttctttagtcttttgggagtaggcagtccctctgctagatcatagaaatgggtcataatgcactgttctaggagtacttcaccagaataaaccaacaagagcctccaaactgaacttgtaaattgaattgcccaccagaggaatgaaaaagccaaagagaaaaaactgacgcgttactctcggaattttcattttcatcgcaaatttgggtgcttttcattttattttatttcattatcatgaatctggagcttttctatggggaaagagagacagtttctatgtttgaaagtgggatattgcagtacatggaccagttatgagtgataaaacatcatcccagacaactgcagactcaaatcatgctgccaaatcttcttcaatagtgttgattcacccattggagaatataaataaggaattaatatatcaacaacgtttaaagagaccatttaatgttatacaaaatttaccaatttccaaagataaaagtggtaaactacctgattatacgacattatctaatccattatctgttaaggatacatctgtactttatacttcattaatagtttcaagatttaattggttaaatcatatatttaatacttattggactaaaagagaacaattaataattggttcaaataattataaaaaggataaaatgtttagattatgtgatgctgaattaaattgtggtgttcatacttttaatataaaattgtttttcttaaaggatgatctaagagagaaagcttttaaagaggaaattgaaaggaaaagagaggaaagaaataagagaaaacaagaaaaaattgatgaaatgaatagaaagagagaagaaagggaaaaacttgagaaggagaaattagaaagggaacagaaggagaaagaattaaaagaacaaaaagaaaaagaaaaagaaaaagaaaaggaacaaaatgctttaaaggagaaccaaactacgatatccaacacaactattacaactgatacaaaagttgtagagaataaggataaagctacaattacccctataacgacggaaaaaacaaacgaaccgataaaagcgccaatagaaacagttattaaacctacagaacttcctgaaaaagtatcttcaccgtctgaaactaaagcttctgcagaaaaatcaaccataatagagccacaatcaactgaaaagcctgttgaaaaagaaacaactgaaaacttagccaagccagttgagaaaccagttgaaacacctactaaaaagccaattgaacaagcaataactactaaatctacaacatcttctactccaataaagtctaatacaagtcaatcaccatcgactacgcctattaatagtgataattcacaagtgaaacctaagataacaaccaaagtattactatccaatcctgaaaatgcaataatgattcaaaacttaaattatctagctaaaaatgatttatatttaaataatttaatgaaagatgttgcaggtggtggtgcaagttctgaacaaatttccgaatttcaaaaatatattcaaaaagctagagctatgggtgatttgaaaaaattatctgataaaattaagaattcatcaatgacaacgactaagaaaggtaaagatattacaatgaaaacatcaatcattaaaaataatgttgaaattagtaaaccattgattaatatgacacctgaggaaattaagaagaaagaggaagaagtacagaaaaggttagctgagatgaaaattgaacaagagaaacaaagattagaaagacaaagagtaaaagaagagaaagaacaggaaaagataaggttaagagaggaaagagagaaaaagaaacttttagagaaagaagaacgtgaaaaggctaaagaacttttaagaaagcaaaaagagatggaaaaggaaatgaagaaacaacaaagacaagcagagaaggagaaaattatgttaaaacgtcaacaaaaattgaaagagaaacaaatgattaaagataatgaaaaactaaaaatcattgaaagggaaaaggagaaggagaaggacaaattaaacaatgatgtaactgattttatagattatgatgaacttgatgatagaatgggtaaattaacaaatactgaacaaaatgatgatctttggaatgataaactttcaccattacaagaaagatattcaacaaatgcacatttaattttcgaatttactgaaaataatgctgctagatttgaaatacctaaagattgtatctatgaaataattgataatgaagaagattcggataataataatgtatcaaaggaggaatcgcctaaggtaaatggagaaatcaaattggaaaattcagaaacttcaagaaaatccccatatgttacaatacttgcatcatttttgttagttcataatgaaaaagaaattaaaggatgggaacgtagaagggaggaagaggaaaaagaaaaattagagaaagaaaaagctgccgctgaagctaaaataaaaaaagaagaaatagaacaacaacaaacacaggataaaccaaataagaggaaacgtaaaactgctaaatcatggggaactaataaaagagcaaccagagcttcaaaacaagcaaaacaattagaaaatttaagacgtgaagaagaaaattattttgaagaagatgatgaattaaggaaagaacaatcaaaaaatagtaataatcttgatgaaaatagtgatgttaaaccaacacctatttattcaccattgactgttaaatttactaaaatacctttcagattttcaggttttatcactaatagtggtaattcacctgatgttagtagagaaaatatgaaaattataatgaatcttggtaaaagagttccattagatcaattatggtatcaagttgatggtatcaatgatgagctattagctgaaactttacgttataatcttaatagattagattatgcaaattcttcacttaagaaatcaagaattatattccaaaagaagtttggtaaaggtggtagaaataactgaaaattttatcaatagtttaataatatgcaatggttaaaattgatagtttataaatgttatattatatataaaatatatttatgcaagagaaggttttcgttattaaaattttgtattattaactaacacttattttcaaacctttcgagtactcatcattcgttgtcgtagtagtttcatcattaaaagcttttttaggaatattttccttattctctaagttatcaccattagggtgatctttattagtatggattgaacttgaatcattactatttgacactaatttattagaacttgtcatagttgttgtagttgcttgtgtaataactggtaaagcaggagatgctaatgttaaccttgttattgggttattatcaggattaatcgatactccagttgatgtaattattgaactagttgttgaaaaatcattggatgtacgctgagaatgtggcaatgatctattaactggtacaataaaatcatttaaattatttaatgaattatttctattaaaatttggaggatttaaattagaagccatattagaatctgaattagaattagaattatttcttaatgtaacagctaatggatttcttgttggaacaataggtgaggcagctattacatgttcattgatatcaccaccattgatgatattgttgacattattgttattattattagtattattgtaatcatgtttcattaattcacttgccaaacttgcaacagttggagaatgtgaaatattttgtcttgtaattttaatagcatcagctgaaacattaattgaagttgacatttgatcaagtattggatgtggatagccaaccgatgattttgtcacattattactgattttagaaatattatcattaaccttattgtctttattagaagtatcattattggaatctttgttattattattagattcgattttaataaacgcagctttagtttcatttcttgaactatttgaatcttttctaattgttacaggtaaattattattgtttttattcaaaatatttgataaattcatatttgagacacttgcagtcattttactgataatactttcatctaaataatttttaaatctcatattagcagttttctcatctaataacattctactctcaaaaataccaggtcttgaaccatcaattttcaatgaattttcatattcaataccattaaataaattaaataactcaactctataacctctacttttagaaactggattaccagataaataaattgatgttatcataactttttccttattaattaataataaaggttttaaatctgtcactttgtaaatattattttgtcttaaatcaattttagaaagtgaagacaaattttcaattgaatcaatttgagtaattttattacctcttaaatttaacattgttaatttttttaaattttttgggaatgtttgggtattgaaaagtttattaaatgataaatttaaggttttcaaattaactaattttgatagtggagcttcaggtatttgagttaaacaattgtatgataaatccaatacggttaaattaattaaataatcaaatgaacctagtgaaagtttttcaattttattttcagttaatgataaatgttttaatagagaccaagatgaagggtttaaaccagaagtttgggaatcaagtaatggagattttttcaatttagaataattatcatttccaattgaactatcaagattgatgttgctgtgattatgaatatattgatgttgctgatggtgatgattattattgttatttgaattattataaaaattgttattattattgtaaatatggttgttgttattattggtattggtattattattattactagtaattttattattgtaaatataattatgatctacttcatcactttttctactctttgaatgagattcatgatagttaatagatgaatgagaagctattggggttgataaagatgttgaacctcttgatcttcttgatttagtatgaggtttataataataagatcttctagttgaatttacagatgatgataaaacagtttgttgagaattaactacatcttcagaatataatcttgttggatgataactaacagccgatgatgttggggaagttgaaatactttgtaaataatcatgattgttataggtattattattattattattatgattattattatgagaattgtaagcatgagaattatgaatatgaggtgttagtttataatgttgattcaaactataattataagaatatggactatgagaatgtatggaaggaattatagattgagattgtaataaatttggagaagtatgattatttttactatttaataaatgagttgataaatttaaggttgaatgagaggaaggaatatttgaattaaattttctatcatttggatcacttgaatttgattttgattttgttaatttattattatcatattcataatattcatcatcataatgtggaaatttattatcattaaaattaatatcattattactattattaatattcatattattattattattactattattattttccattgataatgaatcatcatttgatttaattgttgaatctgcttcaactaagtttataaaaatttcaattggatcagttatatttgcctttttaaccactaaatatcttaatttagttgataatatatgccaaccaaaaatttcttttggttctaaatctgaaatttccaaaactagtaaatttttgaaaattacaattggagttgcagtttcaaaaggatattcttgatgaccttcaattaattttgaattttgttcatttgctaatcttagacaaggtaattttgagaaagctgaatataaatattttaaatctgatacggtactatcaattttagaagttgaaccaaaattattccaaagtgctgaaactgatgacataacagatttaaccgatgaaattgaatgaattgattgagtatcagaatctaattttttatttctttgaaattcacttaggaaagagacataatttgaatttgaaattgaatcaatattttctaatcttaaattcattggaccaactgggatacctaaatctttaaatcttccaagaataaaatataggtgatgtaaagatagtgaaagtcttacaggttttgaaatttcctttgttaatttatcttcttcatcaattgatatatttccattctgtattgagttgttattattagtaatatctttgctgtctgtattatttgattcatcagtatcattcttagtattagaagtaggagtattattattagttttattattattattattattattattattattatttgtagttgaatttaatttcttatatgcaaccagggcatttgctaattgaggctcatgagatttaataaatgaagataaattatgtatataaacatcaccatcacaagtattcttacccatctttcgtatattgttatattatagatatatatagatagatttatttataaaaagggtatatgatatgatatgatatgatataatatgatataatgcacaatataatatgtaatatgtggcacctttttttttctaattctaaaatagcaaacaatgagcagtaagttatagaaaaagggggtatataatggtccctatacggggttatttaaatgtgtatataggtaataaaatagaaataaaacgtcttgttcaagaaagaactcatacaaacccataatcacatttaatcatcaacatcaaaacataaacaagtaaacaaggcaatttttagattttttcaaattttcaaagtgcgggtattttaatcttatattacgtaatgctttgagaagaactacctacacgtctgctggaactggcaagagttatcactgacgatgctgtagctgctgcattggtgtatgtggtatagttggtatgtgtagtgtaggatgtagcagccgttgatcctgaattgattgttgttaaggctggtgatgtgagaacagaatatgatgtaactgctgatctgttggatttattagatttagttgatttagttgatttagttgatctaactgatctaactgatcttgtagagatgaatgagtttgggtatttgctttctctatcttcatggggtattatagtgtttgtcaaatgacggggatgattgttgttattattattattattattattattattattattattattattattattattaatagtactagcagtattattaccatcatcaatttcttcatctgatgataatgaaagtaatggttttgtacttaaattatcatcatatgttgaaccacttaatatactattattatctccacttacctgtaaatgttgattataataactatgaaacagtgaaactggtttattatgtgaaataattgaatttggtagtgaatgtgcaatagattgtggagatgctataatatgaaaatgatttgaccctgatcctgatcctgatcctgatcccgaaattatatcactatgatcaaatgaaattggactttgaataggtctcataatataattagaattggatattgatactgatgttgaatcattagaatcttgtcgatataatggtgtaattgatgtcattgtaatagtatccatattattattattattattaatagtattttcattattattattattattatcattattattattattatcttcttcctcatcataatcatcatcatcaaggttatgatgattactagtataaaaacatctctcttgattttgtttaactctcattgacgtacttgatgatatataacttaccatttcatcattttcaatactagttatatcattcaatggatacaggaatctattattcctcgtattattattattattattattattattattaattattgatgatgcaccagatgatgaatctgtattaatgtcagaatgatatttaggaaatattggtctcttaacagtaccaccggtgttactttgatcatttctagcatttttagtattcttattatcccttgcaaatctgacaactggttttgatgacatatgttgtgcctctgtttcagtacctggggtaataagtctcttaacccatgaaaatcgtttattcttctgactatgtgtcttgttatagttgttaccattcacaccaatgccattattgttatgactgttactattaccacctaccctatcatgactgtcctgcatgtctgatgtataataccaactgataaagaaccaccttcgccttaataacacaaattactaaacgacacgaattttgttgtaaaaattattttttttttcaaaaattttttttctttcccaaattaaaacatttcttactgttagaatagctgtatcttttgcttccttctgtggttatataacacaacacagaggagtatacacttataaatatgaagattaagaccatatctcgttccgctgatgcgtatgtaccagcggcaaatacaagagaggctccattaagtagaaatatgaatcctgaattacatccttttgaaagagcaagagaatatacaagagctgttaatgcaacaaaacttgaacgtgtctttgctcaaccttttgtcggtacacttggtgatggtcatagagatggtgtctatgcatttgctaaaaatttctcatctgttaataaagttgcaacagcttcaggtgatggtgtaattaaatattgggatgttacatcaagagatcaaactttttcatttaaggcacattatggaatgtgttcaggtctggtagtttcaccaaatcaagaatcaattctttcatgtggtgttgataaaactattaaattgtggaaaattaataatgattcagattataatcaaaattatgatattaataataaaaatgaaacaactacaagtacaacaggtttattgaaaacttatttagcagatttctcattaatggcattagatcatcatcagactgatgatatttttgttactgcaggtgctaatataaatttatgggatattaatagaaataaaccaatctcaaatttatcttggggtgcagataatatttcatcagttaaatttaataaaactgaaacttcaatctttgcaagtacgggttcagataattctcttatcctttatgatattagaactaattctccaactcaaaaaattaaaacttcaatgagaaataatgcaataagttggaatccaatggaagcttttatatttgcaactgcaaatgaagatcaaaattcttacctatgggatatgagatatatggataaatcattaaatgtctttaaaggtcacgttaatgctgttatggatgttgatttttctccaactggtaaagaaattgtaacaggttcatatgataaaactttaagaattttccaaactaataaaggtcattcaagagatgtttatcatacaaagagaatgcaacatatatttattacaaaattttcaacagattctaaatatattttttcaggttctgatgatggtaatgttagaatttggagaacaaaggcaaatgaaagatcaggtccaaaatcttcaaagaaacgtgctaaggaagaatatgatgaaaaacttaaacaaagatatgctgatatgccagaaattagaagaattgcaagacatagacatttaccattatcaattaaaaaatcaactgatattaaaaatgaacaaattgcaagtattaaacatcgtgaagagaatcgtcgtaatcatagtaaagaaggtgaagttccttatgttcctgaacgttctaaaactgttgtggggcgtgttcataaacaataacttaatttagttaaataattaaatagatcttttctctgtatattatatccatttcctattacattagtattgtattcaaataccttctccttgtatctattccaacagttcataaactctgataagaagacatcttcatgttgggttgaaaaattctgaaatttccgaattttccgatagctatcatgaatttatcattatcaatccatgattcattatatcagaattaatcatcaccaatcgtccacttttcttctcgactatcaagcaatatctctcaatgggaaagattagaattgcaattgatgtatgttaccataattgctacttataataaacattttactaacattttttttatttttttcttttgatagagaggtggaactttcactgattgtattgggaataacggtagtggagatccaaaggatgattatgttatcaaacttctttccgttgatccatctaactatgcagattctaatttagaaggtataagaagaatacttgaacatttcactaaaactaaaattccaagaggtgatccaattgatacttcaatgattgaatctttaagattaggtacaactgtggcaactaatgctttgttagaaaggaaaggttctaaatgtattttattaacaactaaaggttttaaagatgttttagttattggtaatcaaagtagaccaaatatttttgatttatcaattaaaaaacctgaaaaattatatgattcagtaattgaaattgatgaacgtgttactttagaggattatgatgaagatccaatcaaatataaatctactgcagataataaatctttatttaaaggaatttcaggtgaaattgttagagttattaaagaagttaatgttgaagaggttagaacaatgttacaattagcatatgatcaaggtataagatcaattgctatatctttaatgcattcatttacatatcctaaacatgaacaaattattgaaaaaattgcagaggaaattggattcaccaatatttcttgttcaagtaaattatctccaatgattaaatatgttaatcgttcgaattcatgtgttgccgatgcttatcttacccctgaaattaaaaaatatttgaaaagttttgaatcaggtttaaaatttggattgaaaaatcctattaatgaaaatgataatggtgtttcatgtcaatttatgcaaagtgatggtggattggttgatgcatctaaattttcaggtttgaaagctattttatcaggtccagcaggtggtgtggttggttattctcgtacttgttttaactatcaaaatccaatacctttgattggttttgatatgggtggtacttcaactgatgtttccagattcggtgaagggaaattcgatcatgtctttgagactaaaactgcaggaatcataattcagtctcctcaattggatattaatacaattgcagctggtggtggctcaattctttcttttaaaaatgggttgatgcaagtaggtccagaaagtgcttcttctcacccaggtccaacttgttataggaaaggtggacctttaactattacagatgctaatttattattaggtagattgatacctgaatattttcctaaaatatttggtaaaaatgaagatgaatcattggatattgttaaaacgaaggagaatttcgatattttaacaaatcaaattaataatgcacatgaatatttggatgcaaaatctccctatgaaattgcttatggatttttagaagttgcttgtgaaaatatggcaagaccaattagacaattaaccgagggtaaaggtcatgttatatcatctcatagacttgtaagttttggtggagctggtggtcaatgtgcagttcaagttgcaactgttttaggtataaaagaagttcttattcataggtattcctctgttttatctgcctatggtatgtcacttgctgatgttgttgaagaattacagcatccttttataattgagtttaaagaagaaaatctcaatgttattaatgaaaaacttgaatcattaaaggaaacaactactgctaaacttaaatcacaaggatttgaatctgagaacatttcacatgaagaatacttaaatttaagatatcaaagtactgaatctggtttaatggttccaaagaaacctgaaggatttttagcaactttcaaagaaatgcatttaagagaatttggatttttatttgatgaaaagccaatattagttgatgatattagagtcagatcaagtggaaaaattaatattgaagaagatgaatcgattgatgtacaattattaaaacttcatgaatctaatggctttattgaaccaaatcctcaaagattgaagtttattaaagaaatatactggaaagtcaatggagaactcaaagcattaccaacagagatatacagattggaagatcttaaagttggaacttaccttcatggaccaggaataattgcagatggtacacagactaatgttattccaccaggagctgttgtaactgttttaaaggcacatctgtttgttcaaatattagatgaagcttccaaaatggaattagagattgcaccaacatctgaaactaaaattgaacctgttttattatctatttttgccaatagatttatggatatagcagaacaaatgggtaattcattacagaaaacatcagtatcggtaaatgttaaggaaagattggatttttcatgtgcattatttgattcatttggtaatttagttgcaaatgcacctcatttacctgttcatttaggtagtatgtcagcgtgtatctccaaacaggctgaactttggaaaggtaaattaaaacctggtgatatattaatttctaatcatccatcagctggtggtacacatttacctgatattacagttataacacctgcatttgataatggtgaaattatattttttgttgcatcaagggcacatcatgcagatattggaggtttattgccaggttcaatgccaccaacatcgaaggaattatggcaagaaggtgcagcaatttattctgaatttttagttaaagaaggtaaatttcaagaagagatgataattgagaagctcttaaatgaaccatccaagtatccaggttgttcaggtacaagaagattaactgataatttatccgatttaaaggcacaaattgcagctaatcaaaaaggtattcaattaattgatacattagttaaagaatttagtttaccaacaattagcgcatatatgaaagcaattcaagataatgccgcaaatacagttgagaaaatgattaatttattactggaaaagaataaggataaaacacttaaatgtacagattttatggatgatggatctcaaatttcattatcaatttatcgtaatatagataataataaagttatatttgattttgaaggttcatctcctcaaacatataacaatttcaatgcaccaactgctattacatattcagcaattatttattgtttaagatgtttagttgatgaagaaattccattaaatcaaggatgtttaagaccgattgaagttaaaattcctaaatcatcaattttatcaccagatgatggatgtgcagttgttggtggtaatgtttgtacatcacaaagaataactgatgttattttgaaaacatttgatgttatgtcagattctcaaggatgttgtaataactttacatttggtagtggtggtaatgattccgaaggtaaatatgttcaaggttttggatattatgaaacaattgctggtggtcacggtgcatcatcaagttgggatggtgtttccggtgttcatactaatatgaccaatacaagaatcacagatgcagaaatttttgaaagaaggtatccaattattcttagggaattttcaattagagaaggttctggtggtaacggatttaggaaaggtggagatggtgttattagagatgttgaatttcgagttccggtaactgcttcaatattatctgaaagaagagtaattgcacctcatggtatgcatggaggagaagatggtgaaagaggtattaatctttggattaaaaaatatattgatgaaaaggatggtaaaattaaagagaaagtatttaatcttggaggtaaatcaagtgttgatgttttacctggtgatagaatcattatcaaaaccccaggtggtggtggttggggtaaaataggagaaggaaatgatgattatagtagtaatagttcaaggaaaaggacattatctccagttggtagaggatctttagataatcgtaaaaggcaacaatttgagaattagaaattagattaaacataaaattaaacataaaaagatagtttgtatctataaaaaagacattatttatagaaaaaaggtttaaatttgacaaaattattcgaataattgaagaacactatgtaatttaactaacatttcatcccattcaccatcatcagtacttaaaactgttaatgcaccacctgcaccacatctataagtatcataaccattttcattacataaatcatcagaataacggaaaagagatctaataatgacactccaatcagcattattatttaaagaccaataaccacaaatacctgaatataaaccacgacgttgatttttttcaattttttgtaaaatttcaactgatctcttctttggagcaccagtcattgaacctggtggtaaagaatttttcaaaatatcaatacctgtaaattcatttgtaaaattaccttcaataactgaaactaattgataaattgtttcatattcttcaactgtcattaattttgtaacttcaattttatcaagtaaaaataataaattatctctaattaagtcaacaatcattaaattttcacctaattcttttggaattttcaataatttacaagctttttcataattaatatttggatttttctttaatgtacctttaattggtctcatttgacaaaatttattattccatgaaataaatctttcaggtgatgtagataataacattgaagaattaaaatttagatatgcactataaggtgaaggattttttttaactaaagctttataaatatcccaaggttggaaattatcaggtatttgaacaattgtattataagttaaacataattcgtatgaatcacctgaatgaaggtatttttgacaatcgtggaaacttttaaaataatcatccttgttaggtatagtaatttttgattttttgaataattcattgttaataattgaatcattaatgttgttatctgatttatttagtattgtttcaatatttttaataaactcattatcattttgtctaattgaaactatgtaaatattatttgaaggtgataatgcaataaatctatcaataaagcaaaatttagtatcatctatattatcatttttagttcttttctctaaattttgaatatctataaagctaccttcttcataggacatatagcctataataccaccaacaaatggacatgacattaattctttattttctattacaggattaaaatatttatttgacatatattcagataaagatttgaaaatatcatttgtgtatttctcttcgatttgttcatcattattccatttggagaatttaattgtatttggattttcagttgaatgagtgataacatcggaaacatttacttgaggtaatgcaatgattgaccattcaccaggtgcagaagctgaatttaagagcattacatcttgattatttgcctttaatgtatcacaaatttgtaagatatcaaattttgaatcaaccggtttataattaaggaaattatattcaaaatttgataattttgtagtaaatttttcaattaatggataagatttaactaaatgaggttcaattttaggtaaaggtttagtatgagcatctttatcaactaaactccaaaaatttttaattaaatttgaaccaaatgatgaacaaattgattctggatgatattgaacaccataatgtggatatttgatatgttttgcagccattaaaatggaatcacctgtagtttcattattatctgatggattataaatagctagtggaataattttctttgaattatcttgtttaacataaatggaatgatatctaactgaatctacaaattcaggagtatctttaaaaatatcatcattatttaaaactttaattttatgaatttgaccatgaattggattatttaaataatgagttgaacaatcatttaaaagacaaaagatttgaaatccaagacaaatacctaaaattggtaaattagtacatttctggaaaatataaggaataactccaatatctaaaggatttgaaggagatcctggacctggaccaataacaattgcatcaattgagttcagtaaattatctaaactaattttatcatcctctatatttaaatcatatgaatcattatgaatagtgattacattagcattagtagtagaagtaattaaatttcttagattataagtgaaggagtcataagaatctaccaatagaatggacatactgccgttctaacctgctgaaaaggaaacaccattcagattaaagtgaagtaaagtactttaagctgatgaaaaccgttaagtgtggcagtgagaaaattttcaaatttttcacatttgacagcattagaagaacccttgatttttattattattattatttttatttgacttttcatccttcatttcttatttataactggtgtatggatagatcatagagtaagggtggatgggaagtgaatatgcgtcactaaattactccaattgacggctgtagtggaaaaccgtacaaaattaacgtttatttctattgtccatactgtggaattacctattccagtaactgccgcttatcagtatttgttatcttacttaattgataattataatatttataagatagaatatatttatttactttccaactatctctctatcttacatctcctccttttataaacaatgtcacaaacagttttggtcacaggtgcaactggtttcattgcacaacacgttgttaatgaacttttaaataatggttataccgttatcggtactgctagaagtgaaaccaaaagtcaaccattgattaaattgtttaaagaaaagtatccaaatggtaatttatcatttgtaattgttgaagatatttcaacagaatcagcatttgatgatgttctgattaataataaatcaattacaaatgtaattcatacagcatcaccattttcttatggaattgataaatcattagaagatgcttatttaaatccagctgttaatggtacattaaatatacttaatgcaatttataaatatgcaccacaagttaaaaatgttataattacttcatcatttgcagctttaaaacaatatggtaatgaatatacaactcatattcatacaaatgaaagttggaatccaattaattgggaaaatgatgttaaaactgaaaatgatggttatagtgcttcaaagacatatgcagagaaagcagctaaaaattttatgattcaacaagatccaaaaccaaattttaaattaacaactgttaatccaccatacgttttcggacctcaatgttttgatgattatgttagtaataaattaaatacatcaaacgaagttttaaacaatataactaaaatagatccatccaataatgaaccacaagttgttttcggtgctttagcaattgatgttagggatgttgctaaatttcatgtattaccattatcaaatgaaaatttacaatctgaaagaattttcctaacttctggacctgtaactgctcaaaatgtattaaatataatgaatgaatcatgtgatacattaaagggtaaaatagctattggagatccttcaaagactaatgaaataattgaaaaaaattgtccaaaatatgatttatccaatttaaagagtattataggtgattatgaatttattaatcttgaaaaatcaatagttgatgtctttgatcaatattataaagttaattctgtttagctggtctatcttttgtatcttttcatatctttttatatctttttatatctttatcactattattctgaaaaatcacccacgacagacttgttgttgtgtgtttctacccatactatttaacaatgtccatatttatgctcttatgggcattaaatcactcaaaaactactcctagtatactctagtaggtaaagtatcatattcattaagttaaacacttatatctgccaattaactaataaaataaccacttaaattattacagttgagccacctaaaaatggaaaattgacaatattagaaagtaatttgggtaatatgtgaaaacagcatgaccaataactacaaacacaacccaaaaaagtgttttacatcaatttatcactacttagaggcatcgaatcattatctaacaccataataccattaatcctttaataaatacaaaaaagaaacaatttattatacatgacactaccattacatgaataatttttcaacatctcttctcataaagacgaacttattcttttcactacgatttatctaaacaacacaccacagtatatactatgccagtagataaaaagacacaaactataacatcaacaataacaccaccatttggtgataaatttcaaatagctgcaatattacccattgaacaacccattattgaaactggtaaattacagaaaattccaatttcaatacatttaagtaaatccggtactgatacaccattaggtagttatatatattcaattattaatcatagaaatgatgaagtttatcaaacattattaaataatagtgaagaatttttagttgatatgggaatgaaaattggtagattaataagtaaaaaatttaaggtaccttcatatgttagtatttcaggtaattggaatatagaagaattacttatgacaattcaattaacaattaaattcatacaagagagttatatataatatattaagtatatatatgtatactatttaaaatctttataagaccatttttcagtaattttctttttacctttcttacctttagtaattcttctagtttcaatcatacccttactttggaaattcttcatttgatcatataataaattaccttcaggttttaattttcttaatgaatcacttaattcattacttaatttaacttcaattggaccttcaataacttctaattttgaaccaagtttctttttacctttcctaacaaatctttcatgtttactttccttattaagtaaatcaatattattcttagttttttcctctgattgttcaatttgttttaaaatttcaggtaatttctctaattctttaattcgaagtttaatatcctttaattctttctctaatctacttctttccttatgacgtttttctttatttctcttagttttagtcttaatttcaactttagtaactggatttattgataatttattatcaatttcttcctcctcttcctcttgaaccggttctttttcttcttcattattctcctcttcaactatactatcatcaatttcttcaacttcattatcttcataatttttaattaaaaattgtattttatctctatattcctctaattctaatctttgatcttcctttggcttttccttaaaatattcttgttcaattaattttttccaattatcaaatgatggattataagatttacctgcatgaggtaaaatttcttgtttcctaacttgaattggtgcttcctttaatgtcttcggtataactgttgcttcagtaaatgatgttgtactattattttgtaaaaaatttggtaatttattacgtttaatttcattatctaattcagtttcccaaacatcatatgctttagaattaattataccttcctttgctaatctttcatcacctttatcataacctttaactttaccaactaattttaataaatgaaccatttcctttttactaacaccttgaattttatcctttttacttttaccaattttcgttaataatggaggaattttactcttatttgataaaatttcacttgcttttaattttttaatattatctctctgtaagataacattggcattatcatcagcatcttcatcaataatgaataaatcttcactatcaacatcatttaaaattttaccatgttgaattatttcctctctttgttcctgtaatttagtttcaatatcttcaatatcaacattttttctccatgcacgtctacctttcttagacttttgtccagagttctgtggtctaccaacactactcattctgtttgccaaaccaaaattgaaaaagaaaagaaaaattgttataattttaggaaaagtgaaatttttttcatgataatttttttatcttttctatattaggtaatcctcttgatctatcatcttatattactatactacactcttcacaaatccttcctagcaatcttaatggcatcaatttactggtcaattaagtttagaatgagtagattcattaataatattagattccttataatacgtaatagaattcaattctttatatttttagctataagtatagtattattcgcattttatggattatcgaatgataaaatatttgatgaatcaggttcaataattattaatgaaggtaaaccaaagacgcagaagatgaataaagttaatgatttttcagatattgattatccacaagttgaaaatttaattatattaccatgtcatgggatatttgcacctgaattaaatagtaaaattggtagtgataatgttgatgatggaaatagattttcaattggtttagatatggataattggttacttgaaccatttcaaaaacaatcagaggatcatatttcatttttcaaacatttagagttatcgttattagaattacataataatataggtaattctgcattagttatttcaggtggttatacaaaggataaaattgaaaaaagtgaatcatcaagttatttacaattagctgaaaatgttggatttttgaaaaatccttattttaggaaaaatactaatattttaattgatgaatttgcaagggatagttatgaaaatattctttacagtttaattactttttataaaagatttcataaattaccaaataaaattacaattattggatttggttttaaacgtgaaagatttttatcatcacatttagttacattaggttattattcaatacctaataaggaagatgataatattacattaaagatattatcagatactaatcatgttaaatatattgaatcaggtcctttcctaccagaggataattcaatgtcaattgatgaatatgcaatttatgagaaaacattttgggatgatttatataaaagtgaaaataataatgcattaaaattatttaaacaaaatccatttggttcaaaaggttcaaaactatatgaaaagaaattaaagagagatccatggaataaacaatcattattgaattcaatttatacaacagataatgaaattttaaataatttaattaaaattgatcaattagagataaatgatgcttggaatttatacaatagagaaattttaccacatttcccattataccaacaatagtactgtactattcatatccatcaagtaaattaattaattcttgtttcctctccttcattatattaattttttccatttcattctctaaatattcaatttcattatccaaactttcaaatttcctcttaaattcttcatcaactttagagaatgaaccatcagataattccattatcttatcattattattatcattattatcatcatcatcactctcttcatgataatttaattttaatatataatcatgatatttaattaaattttccctattactaattgtaattaatgtaaaacctctatttttcaataaatcaaataaaatatcttcaaaatcataagaaattgcacttgttggttcatctaatacaacaaattttttattatgaaataaaattctagcaaaaattaatttttgtctttcaccaccacttaataaactattccaagttgttttaccttcaatattaccaggtacataactatcaattaattcaattttttcatcattaattataatttcatcaattttagaacctttaccatttggattataattaagtccaaatctatcaattaaataatctaatccaacatcttttaaaacttttataattttataatcatcatcacccctttcaatacaagttttccaatttaatggataaataatttgatctcttaaacaacctgaaacaaaatattgtttttgactaacataaaaaatatcattatttgatggtttacttaataatccattattaaataatggccataattctgaaataattctaattattgaagttttaccacaaccatttttaccataaattaataaattttcaccttgtaaaattttaaaatttaaattttttaaaattggtttattaaatggtccattaattgatggtggtataacattaatatgttcaaatcttaaacctgggaaattatattgaattgtaccattttcaaatattaaattatttttagaattattattattattattattattattaataaaacttctaaatcttgattttgatgcaaatgatgataaattataagttgaaccaaaacctccagttaatttagatttatttaaatcaatataaccataattaaaattagaatcatgaacttgatgtaaattaactaataaagtgaaaattctatcagttaatccacttaatcttgaaatatctttaattgaatacattaattttgaacctgcatctgccatacttaaaattaatcttttattaacagtaaatgatttaatatttgatgaagcaattgattctaatgaatttgttgaatcaatttttgagaaattatttgatgaattaaataaaattggtaaacttgcaaagaaataaccaaatgcaggccaaattgattttaatatataatcttctaaaatttgataaataaattttgtatttgtttcaaaatgtaattgattaattaaattattgaaaatttcttgaacttttaatctttcaaatccaatacctttataaaatgaaatttcttcacaattattaattaaattaagattataattataataaatactttctaagaaacttctaattttccaaagttttgaaaaatttggtgaataatttttcaatattaaacctgtaacaaaataatttaataaaataccagttatacctaaattaccaatattatccctaagatacattgcaaagaaaactaaatcaaccattggtttaccaacattagtaaataaattagttaaagattcacaaaatcttttaacatcttcagtaatatattgattaattaattgatgattaagtttataagcttcaagtgattttttatttctagaattgatattattattatttgtatcattatcattaacattattaaattgtaatttataataaaccaatttactatccatatataaatcatgacaatatctaaccaaattagttctaaaatttaatgaaattcttctagttaaatattgaatacctgcattagtatatgaagcaggtacagcaaataaaaaccaataaatcatatctcttaagaaatatttaatattaaaagacattaaatctttaataagttgaccatctaatttagtaactaaaagagttaaccaagttcttgcaaataaaagagtaatatgagtaattaaaagtgaagtatttttgttaaagaaattaggtataaggattaaattccaaataattgataatttttcgaaaaattgaaattttattgcatttgtatattgagagtcagtattattattattattattactataagaatttaattcatgatctttcataaattttttaaaaattaatttatcacgttcatatttatcattactttcaatattcaatttaacagttaataccctatctttataaggaacataaataattcttttattctttgtaggagtagtagtagtatttgatgatgataatactcttctttttgatttgaaattccatgttggggaattccttttaaggaaagaaggtataattgagaaactattaaattttggagataatgataataaattaaataatcttaatatttgataagaagataatgaaaatataagtaataaacttgatataaagaataaccaaacaggttttgaatttgtattaatatttaaaaatttaattaattgtaaatattttttccaaataattttatcatttcttatctgattaagtaagagaaattttaattgaataaattttgaatttaacttttttggattaattgaccacattgttaaaagaaggtagaataagtgaaagaagagaagataggatagtataataagttataatataaatgataattaaaaacggggcatataatggtgtctttaagtaaaatactattatactaattacaccgatattaccccagattttaatcatcatcataaataaaataaaataaaataacttgtcccctcaataaattttgtttgacatatttttcatttcatcccccgcattccccaggtggcgcattagatctttttcagtggcgcatgctttacgtaatggtatatgattatattgatattgatattaatattaatattgagtatgtgtgttattatgtatgaatattactttattatactacgtatatatactctagtctatcatactgtaatacactatagtattttaatacaatactcatctctaaccaaaagagaaaagaaaagaaagaaagagaaagaagaagataagttaagaaaaggatgagcctgcacagtaataaataatttcgctaataaatttattattacaattactttattattattggttagtatttgttacatactctatatactctttacaccctattactatcaatcatctatttatccactgtatcattaagtataatactataatacagcataaataaaagaactcccacacaacaccgatctcggaaaagcattccaaccaataatatccatttaattaccaatattacactatattaggtgcactgaagtcatttttccagtcattattttttaattaattaatcattcactatattatatattaaggaataacagttccgtaatttatatcacctttacctattatatacttcttcttctttcttttcaattaaacatcacaatttaacaatgttatcaagtatatcacataataaatcatccttacgtttattcacaacttattcaaaatctttatatccttcattatcatcaatttattcttcatccccttccaattccccttcagcttcatcttcagaaactccaaagaaatggtcaagacatgttatatcaaataaacaaccacttcaaaacttactagaaaaggaaactccatcccccgtttctacccctaaaaagagaaagagaagaactttaaaacctttaaaagctccaattactttaactcaaaatgcaattgatcatttaaaaattttaagtaatggtccaaatccaaaattaattagaatttctgttcaaaatagaggttgttcaggtttaacttatcatttagaatatgtttcaaaacctgaaaaattcgatgaaattgtaattcaaaataatataaaaattttaattgattcaaaggctctattcagtataattggtagtgaaatggattgggttgataataaattatcttcaaaattcgttttcaaaaatccaaattcaaaaggtacttgtggttgtggtgaatcttttatggtataataattataattataatcataataataataacatattctctttatatatacccccagtataatcttttatataatttctcttttctaataaactaattaaataatattaaatgaaaaaaaaaaacttacacttacataaattatttacaaactacttgtctccctctttaaccataaccattcatttgatttcctctcaaatttaccttcatataatttccatatcttggcatgatattcattgatccagtccttttcttcattacttaacatttgaacattaattaatttcttacaatatggtactgttgtagttgtaacaaattcaagccatccttccctatttgataattctctaagataaaccatattttcaattctaataccatattcttcaggtttataatatcctggttcattactaactaaatgtcccttcttaatagtattttcattacaatatgctctaaatccaatcccaactcctgaactatgaactggtccaaatgaatcaactccatgtcctgtaccatgcatataatctaatcctttattccataaaaattgtcttgcaatacaatcaacttgaaatcctgtaactcgatcatttggtataattaatttagctaatgctatatgtccctttaaaactaatgtataattctcaatttcctctatcgttggttcactaaaatgaattgtacgtgttgtatcagttgtaccatttaaaaattgtgatcctgaatcacataaataaatcttatttggattaatcattttactaccaaccattggtggtgaataatgaataattgctgcattagatccagttgatgatattgtttcaaatgataatcctttaaaatttggtaatgtctctctaatttctaataatttcattgcaccttcatattcactaataaatgaacatttattaattaattcattttcaagccatgcaaaatatttaataattgcaaatccatcatcaatttgtgcttgaatttgtccttcaatttcaactttattcttaatttccttcatttgtttaattggtgaatcaacttgaatgaaatttttagcaattatacaattaacaattttccatgtactatcatttgtaagtaaaattttcttcttttcactatttaatcttgatgcaattttcctaatatcaaaccaaatatcatcataattctttaattcacaattaatttcctttaaatattcctttaattcaccatcaaatcttttatgattatcagtgtataatattaaatgattgatatcatcaattattaaataactataaaataatggattatattcaatatcattacctcttaaatttaataaccaagcaatttcatctaatgcatttaatataatagttgaagaattatattttttaaaataagtttcatttaatctctttaatttactttgtgttgtttcaccagtgaatttatcatctaatttgaaaattggattaaattgtctaactggaatttcttcaaattgatcccaaatttgatcgactaaattatctcgttgaggaattaatttaattttataatttggattttccaataatttatcattaattaatttttcaattgataaaacttgtgtataagtaattaattttggatcaataccaatattaacattattacctgaatctaatgataataatgcagcatgatcaactgcacattgttcccatgagggagtatttggagtatttaattttaataaactccaattaaaatccaattcatttgttgcttgtgtgaaatatctaccatcagttgctaaaaatgctaaaccttcaggtttttcattcatactagttaattctcttgtaataattgcaatacctgcagatcctgtaaatcctgtaataaaagatctacgttgatcaactaatgatgtatattcagattgatgtgcatcctctgatggtataatataaacacctaaatctgatttttccattaaatttctaattttctctaatcttaaacttgtattcaggtttaaatttgataaatctttacaaatttcaatactttcattagatagatcatgattagcattatcaatattattactactaatacctcttcttggtgatgtaggtaaactattattcggtgaatgaattgatgaaatcgatgatgaacgtctattattatttcttgtagctgatgaattacttgatatcattcttcttaaatacattgaagaacgtttatttcttgataataaacctggtgaacatgtacaattattacatcttgtaccataattaggatttaaatttgaaattctatgtccctgtgaagcctgtgtaatagttgttgcaccgggtgtaccattctgtgaaataagtgaaaacatagatggcttagccatattgaccgggtgattacctctaacagacataccttataccaacttcccttaccaaaagaaagaacataagatgttgtacattaaatattaataatattaatatgataaatttttatgtcctcttcaacgggtggcgaaagaggcaactttaattttaattttaattctcactccactgtattaaccagccttcttttaacatcaagtcttcctaactgtcttttatttcatatcgtttgactgctattggtcattctacctatctatcccattcttctattatatgtcagatctggatcatatagtctatcttattaaagagttgtatgctccatgtcagaccagtgagactatattaaatactcagaaacaattacaaattgtacagaaacaacctaattctaatatagtggctcatcagttattacaacatgatgaaactaatatacagttctttggagctttaacttatactgtctatattactaataatccagtaactttagaattggctaatcaaatttctgaagaaattgtagatgcatgtcgtagagatttacaattaatggttatacaaaaattattatcaaatatggctaaaatttattctaaaattttctataatcccttagattatatcttaaattcattagagaataggttgaattttgacattgatcaaaccttggttttagcattattgtcaagtaaatcaatacctgaagaattattatcatcgaaaatttcattaacaactgaacaagttaatgatataattaataatatttttaagataacaactataaatattttggataattcaattccacatttaaaaggtgatgatagattgacatatctgtggttaaattgtattgaatcttggttacctttcataaattatgcatttttcgatttccatattgtaattgatattaataaatatttatcaattgttattgatttattaattaatgatttagatgatactgcattagctatcttatgtgaaatttatgatactaatactaaattaattaatgaagaaaataaattaaaacttgatggaatgatctttagtaattggtatcgagaatttattgaaaggaaagatattgatgatgttaaaaacttatcaaaattattcacattatatttagaattaaatcttttaccatttgctcaatatatgttaacaccaaaatatgcattaaaatttaaatttattttatcacttacaaatttatatgaaactccagtattagcagattcattttcagttagtttactggatttttggatcccattaactgaagatgttttatctcaaatggattcatattcatcaaatattgaaattgaaacatttttcatgatattagctgataattattggaaaaaatctcgtcttatagttggtgatgaatttgttgatgatgaagatgatttctttgatttaacaaatcttgaagaatttttaaattatagacgtgatgtggcagaattatttgaatctctttattcaattaataaatcagttttatttggtcatataacatctaaattaataactgcattagatactaaaactgaggatattgaaatgaattgtctgaaaaatattgaagcttcattattttgtttacattcaattgcatttattcttaatgaaaataatgtaactgaagatttttatcaaagtatggataaaattttcagttgtaatttattgaaaaggatattagaggtacgagattttaataaacttgaatatacacgtattagtaaaaaatttaaatatgtaccatttgaagaattatttcaatatcttgttaaaatgacaattaaatttttatcagagattaaatggtattatcaaactaataatggtaaaaaatatattaaagatattttaatatttttatttaatttcctgaatgttgattattatagagatgttagttcaaaggcaattttacaaataactgattcatgtagatatgaattaagtgaattattaaatgattttgaagcttcagctcatacaatgtttagtcaaaaatataatattgattcaactattagatcaagaattacaagaagttatgcaaatattttacaaactgttaaagaacctcaattacaggcacaaaaaatttcaaattttcttgatctgatgtataatgaagttcaattatcatatagtctgataaatgggaatattaataataaagaagtattagaaaatattgataattttttattatccgttatttcatgtttagttggattagctaaaggtttgaaaatccctgaagattgggaagaatattatttaaataataatagacaagatgaaatgattaataattttaattattggaataatattgataagaatgaatttaaagttcatgaaaaatgtttaaaattaattgatttattttcatttccaaatgaatatattaatgatttaaaagttaataaattactaaattccgaaattatggaggaaatttatttatttttcaaagctggattaactgaaccattatcaggaccatttgttattgattctaatttaatactgacatatattttaaaatgttgtgaattatttcaacaaaaattaattccaaaacatattaatccaccaattactaaaattattgaattatatggtgtattaattaaaagtaatatatcaacattaacgatttccaaaatatcaggattagatattaaatcaattgatttaaaagtcccaatagttgttaatgaaatatttttaaaaccaattcatcaagtaattaaagaaaatgatattttaacagctgaatatacattatttgcagatataatttctacatatccaaaatatttaattcaagatggttcaataattgttaaaattatgtcattatcaattgaacaattttctattaattgtcaagatagatttgtcattattgcaatggcaaaattttggacaaatttaatttatttaagaaagggtaaattggaagatattcattgtattaaaaatatattaattaatgaaaaattaggtatttcacttgtttattcattaattaaaggatttttaaatacttcaagatcaattattgaattttatagtgatattttaagatcattaattaataaatttagtaaagatttgaaaaattggttaattttaacatttgatagtattaataaggaaagaattttcaatggtaaggagaaaattgatgaaaaggaaattgaaatatttattaaacaattattaataactagaggtcaaagaagtgcaaatgaaataattaagaaattttggttaaatgctacatcaatgattgattatggtatgtaaagagtttatacaaaattatacatttgatttatcaattaaatcaattaatgcatcacattcagatgatggatcaacttcacttaatccaacaacttgaaaacgagctttatcaacaccttgataagaatccattctagcacgaattctaaaattaaattctttatataaaactttattagttaaataatctcttaaagaattttcaatacctgaatctttaatttctaataaagttttagcatcacaacctaataaagtttcaccttgttcattaaataaattaatccacatttgaccagtttcatcaacaacacttgcacttaaaatatatctataaagtggatttttatgattaatttcacatctttcacaacgccaagttaaatcattttgttcaataacttttttagaacaaccatcagttgaacatgatggataactaaaattatcaggttttataaatgaaactgatgctttaattgtaaaataatctggtttttcattaaatccaaatttcatttcatgagctaatttaattgaagttctatgtaatattgaatcttttgaatttaaattattatttgaattattagaaattgaatttttcaatgatttaaaattttcaattgaaccttcattatcataccaaccttttaatttataagcttcaggtaaatttggatttgagaaaattgttgcagaaggtattaatgataattgtttaccattaaattcattaactttacaacctttaattgcaattggtgtaccaggattaagattaaattctcttgcatatttattccaaagaccaacattaacttccatttgagattgatcaacaattgtaatatctcttctatcataaggtttaccagttgattttgaaataatttcctttttttcatcaatatttttcaaaatacctaaaacatcaataatttgattattttcaatagtttcaatttcatttaatttaataaaattaaattgaactttaggtatatttgaatcatcattaattaatttaataattgttgatttttcaagtataatttcatgttcatttttaagtgaattaaaagttttatttgaagctctaattgatgctttactaatataataagcattattttcttgtaataaatcataaaacatatcagcggaatcattaaatgcagttgccttaatttcacttgtttgatccataaaatgaactgaaaataatttaccttcaccttttgcatttttccaagttttcatatcacttttataactaactctaactttaattgtccattcagattgataaggagataattgatcaagtgttatagttgatggggagttaggtttagtagtggtattagtattgatatttggtttttgttctaattttggtatcgtggtatcattagtattattattagtattattattagtattagtattagtactgttagtactactattattattattattaatttcattttcattacctaataaatcgacattaccaacgatatcatctaaatatttttgataacgattttcatttggatttaattttaaataattatcaactaattgataattatcattaaatttttcaccatttgaaattatttcacatttatttaaaaccaggaaaaatttaccattaactaaacttatattaaaatttgatatataaatataagaaaattttgcaaaattatcaattgtattttgaaattcatttggtttaaaaattgcattaatacaatatttactatcatttaacatcattctaattttagcttgaccttcagtgaaaattttagattgatgaatttgagcatagaaaggagttgttaaatcattattggtaaagatattaagtaaagaaccaggtactagtttatccattgttagtttgatataataagagatatttaagagatatttaagagataaaatcagataaatttgataagaaacacgtattaattcaaatctaagggcgttgttttaagatttaattattttaaaatcagtgagtgggtattgaatattgaaaatattgaaaattaaaattgaaaatcaaaataattcacgcgtcacgtcgatcgacccttttgaaaataaaaataaaatgattacgtaataaaatcaaccgacgcaccgactatatcacgtgaccatgtattacgtaataaagagtcacgtgatgcagtgcacatgacatcatttcgaatcctaaatcataagaatataatagtgggataattaatattcaaaatttaaaacaataaattattatctacatctaagcctccttattattatattcattgatgaattgatggtttaaagggtattaactttaattaattaattaaaagaccctttccttatcttatcttcttgtaattaatttacttattacagtactctaattgaggcttatactatataattctaattctaattctaattctaattctaattctaatttactatcatttattatatctatttctatatccatcttacaatcatatcctataattaatatcacactcaaaagattatttattattcaacatgattgatgatttagaatcaaatatcaatatcaatcaagatattgataataatcattataaaatttcattacatgatttacaatcattattcgatccaaaatcgattaaaaatttaatttcaattggtggtataaattcattaattaatgatttaaatacaaatattaattcaggtttaccaattgatattgatcaatttgatattaataaaagaataaacatttatggtgaaaataaattaccaataaaggaaaataaatcttttattaaattatgtttagaagctttaaatgatcaagttttaattattttatcaattagtgcaattgtttcacttattttaggtctttatcaaactttttatcaacctccagaaattggtgatgatggtaaacctttacctcaacttcaatgggttgatggatttgcaattttattagctgttattatagttgtaattgttggtgctttaactgattataaaaaacaattacaattttcaaaattaaataataaaaaacaagatagacaaataattgtttatcgttcaaataaaaaaataatgatttcaatttatgatttattagttggtgatttattatatgttgaaactggtgatgttttacctgctgatgttatattaattaatggtaaatgttcttgtgatgaatcaactattacaggtgaatctaaaacaattaaaaaatcaactatttttaaagctttagattattataataatgaaattaaatcaattgattcaaataataatttaatttcaaatccacctccttaccctcaatattccacatcccgatattcttcatcatcttcattacaatttgatattggggatgatggtgtacttgatccattccttttctcaggttctcaattattatcaggtcaaggtaaagcattagttatttgtgttggtgaaaattcagttaatggtaaaataatgaaatctcttaatgattcagataatgatgatgaagttactcctttacaaaatagattaaatattttagctaataatatctctaaatatggatttttagcttcaattatcttatttattgtacttttatcaaaatttttaatacaaattgcaaatggtgaaatatcattgactttcactcaaaaattatctaaatttatcaatataattataactgcaattacaattgttgttgtggcaatacctgaaggtttaccattagccgttactttagctttagcatttgcaacaactagaatgacagaggatgggaatttagttagagttttgaaaagttgtgaaacaatgggtggtgcaacaactatttgttctgataaaactggtactttaacaattaataaaatgacagtggttaaaggtttaataggtgatgatcaaatatttgatgatattgataatagctcatatgatataccaaattcaaatcatttattgaataaatgttcaaataatttgaaaaattatttaattaaaaatattttattaaattcaactgcttttgaaaatacttatgatccagtaactgataataataataataataataataatattaataatcaccctactaattcatttaatatatttaattggtttaaatcaaataaaggtagaaatattttaccaatttcatcatcagattcatgcaacgaatccgatgatgaatcttattcaaatacccctaaggatgaatttgttggatcaaaaactgaatgtgcattattatcatttgttaaatataatttcccacaaattcatgatactgttgaaaatttacataattttagagaattaaataagaaaaatattgttaaaattataccatttgaatcatcaattaaatggtcaggtattgtttatcatgattttgaaaataatgaatataattttttcattaaaggtgcaggtgaaatcattttaaataattgtaaatcattaattaatattaatggtgaaataattccaatgaataaaaaattatttgaaaaaattgataaatctagggaaaatttagcaaatcaagcattacgtgcaatttcattagctcattatacattccaaaatgatgaaatttctaaaattaattgggattcaattactgcaaatgatttaattaattatccattaattttggatggaattgttggtattcaagatccattacgtgaaggtgttaaaaatgcaattgatgaatgtcatagagcaggtgttgatgttagaatggttacaggtgataatatacttacagcaagggcaatttctaaaagttgtggaattttaaatgataaaacttttaatgatcctcaatattatatggaaggacctgaatttaggaaattatcatataatgaaaaaattaaagttgttaaaaaattacatgttttagctagatcaagtcctgaagataaaagaattttagtttcaattttaaaaaaattaggtgaagttgttgcagttacaggtgatggtacaaatgatgcacctgcattaaaattagctgatgttggattttcaatgggtaaatcaggtacagaagttgctagagaggcaagtgatattgttttaatgtcagatgaatttaaattaattgttaatgcaattaaatggggtagaacagttgctgcatcaattagaaaatttgttcaatttcaattaacagttaattttacagcagtttttttaacatttttaacagctataactaataaagatgattcaagtgttttaactgctgttcaattattatgggttaatttaattatggatacattagctgcattagcattagcaactgataaattagatgatgatatattagattcaaaacctgaaggtagaaatacaaagatgatttcatttaatatgtggaaaatgataattggtatgtcaattttccaattaattataactttaacattaaattttaaaggttgttatataatttatggtaaaaatttaaatgatttaacaacattggaattaatgatggttaaatcaatgacatttaatacatttgtttggatgcaaattttcacattatttgtttcaagaattttaaatgaaccaaaatctttaacttttaattcaaatttatttgatagattatcaacttcaaatgttggatttttccatcatataacaagaaattattggtttattggaattatttgtttaatttcaattttacaaattttaattatgaattttggtggtagagcattttcaattgtacaacaaactcctttaatgtggtttatttcattaatttgtggttattcaatgattccattaggtatattattaagaattttacctgattatttattacaaaaatatttaccatttaatttattatataatttagttagttggattgaatggattttatttggatgtggtttattttcatcaccatcagttcaatcacgtgaagaaatgagagaatttattaatagagatggtaatattaatgtttatgatgaatcaagttttgaaataagtaaaactccaagtccaatgttagatgcttcaaattatattgaaaatcataaaatggataaattaactattcaatctaataataataataataatgaacataatcaaagaattccaacaattttaagtagttcaccatcacaggaaagtctaattgatgaacaaaataattcaaataatattaattatacaaatatttaattagttaacaatgtatacctctatgtaataataattattccttattaaataattggatatattttgatttttcaattttaagaaaatcaacgaatgatgaataaacagtttgaaaataaataagtgatttaaataatggttgtaaatcaattaaattatcaataattttaagtaatttttcatttatttcaatatttgtatcatcatcattatcatcatcattatttttaactatttgaatttcattatctatttgatctttaattaaattctttaaaccatttatagattttttaaaatcttcaagtttaatttcattaatattggtgacattttcattttcattatcaatattactctctacaattgattttaataaatcataagatttaagtattttctcaatatctgatttatttcccattaattcccttaattcaatcaaatttgaattactacctttatcattaatcatatttaatttatccctagttattttcaaatcctctaataataaaaacattgaagaatttaatgttttcaaatgatattgtaatctagtttcaatattatcactttcatcacttttatcactttcattatatgaaataatttgatttgatgaattaattaatttttcataattttgatcaaatcttttacttaattcattaatatattcattaaaatgtgaacttaaaatcatacatttttcagaaaataatttcaatgaaatatcagaattaatttcattccttcgtattatattattattattattattttcagttgaattaattgaagctgaaacaagtgcatttatataatctattggatcataatcatgatcaaagaattgtgataacacttctgcctctaatggtgattctaaatcaatagtcatactgtttgttgaaaagaagtagttaattacaaatagaatatttcatgttagaaatttcaaacaacgagtattttacaaatacttattacaaagttatctttacaaacttcacgatgaacatacccttgatagagatccaaccggatgcattacaagtacttcatgattatcaacactataatggtgatttaccatggactgaaaaaatatggttaagaaaaaataatcattcttattcactttcagttaataataattcattctatgataatgataataatattaagataactctacgaaatggtaatattttccaatacgatgatggtaacgataaattggacattatattcccaaaatattatccagttttcaataatttaccatcaattgaatcaaatttaactagtttaactaaaattgatgataatttaataattggtaatagtaatggtagtttaattaaattttcatatcctattgggaaatcattaattaatcatgaattaagagaatttgcacattttaatgatattttgaaaataatgacattcccaagtaataaagttattgtaactcttggattagatatgcaaattaaaatttggtcaatttcagacaataaagaaataattaatgaaaaaccattacgtattttaaataaagttcatcaaagtagaataaatgatataattatgataggtaagggtagaaatttaattagttgtagtaatgatggtttaattaatatttgggaaattggtagtggtgaaagtatttggaaaggaaaaaggattaaaaaattaaatgatagttgtaaatgtttagctttattagaggttgaaaatagtaatagtaatggtaataatgataatggtaaattttttgaatgttatggtaaaattttattttgtggtcatagtagtggtactataacaatatgggatttatcaaatagattaagttatggagaatttattacaaataatgataatataggtattgaatggataattgtgaaagatttgaataatataattattggattgatcaatggtgaaataattagttataaatatgatttaaaaagtaaggaaaatattgaaaattggcatataaataccaatatcgatgataattcaataaagaattttaaatgtaaattattaaatgataataaattaattatattaattaatcaatattttatggaattagaattaattaatggtaaattaaataaattatttgtcggtattgatgaagatataaatgattttatccatattaaggaaacgaatgaattattaatcaccggtaaacatcaattaatggcattgtatcaatagaaagtatttaaagtttaatacagccgtttatatgggggataaggtttttatttatattttaaattgtacaaagtttttatattatatattatattgtatacatgttatagatctaattattagtgttaatagcaggtaatgataaatcagtaattgaaggtaaaacttgtttattaattgaatcattactgtcttcttcatcatcttcatgttcatgatcttcctctaatttaacaccaggactttcaagtttaattctattatttgtttctaatttaacattaatagtttcactattattttcatcatgatgttcgttttcactattattttcactattattttcattttcattttcatgttcatttttaataattattttatcatctttattttgatcataattataattattaaaatcaaatggtgtatttggtctactattatttaattgattatttgaataatttgatgatgataaattaggtgtatttaattgtgatgattcagtattagtgttattataataaggatttgataaattaccattagtattaacattactattattatttgatggagttcttaattgttgaatttgttgagtaaatttttgataatttgttaaattcatatcagcaaataaatgattttgaattgttggattattaaattgttgttgaaattcaatattatttgttgatattgatgttgttgatgatgatattgattgatcatctaatttattaatttgaatttgtggtggtaataattgattattattattattaatattattttgttgtaattttttttgttgttttaataattgcttttgttgtaattgttgttgttgtcgttgcttttgttgttgttgtttcatttgaattaattgttgttgataatgtttttctaatcttttctgttctttaattgctctacgttgagctgccttttcagccatttgagcttttaaattttgtttataaatacaataatcacatttttttttactatttctctttggagtatatttataaccaggatatttctctgcatgaaatcttttctcttcttcagctaatttattccaatattctctctcatttggtggtaatgctttccatctattacctaattctcttgaaacatcaggatttgttttaatttcaccttcttcaattaatgcttgatgatgtttttgtctaaataagataaaagcatttcttggtcttggaattcttgatgcatcattttgtttacaagtacatttttcaggaattttagtaattatttcatttgattgtaaattaatttgattttgtatttgatttggaatttgattttgtacttgaatttgaatttgatttgaaattggattaatttgttgttgttgtgataatatataattataatgatgatgttgattatgaatattatcatttaataaattttgttgttgaatttgatgttgattattaaattgaatttgatgttgattagtaaattgaatttgatgatgatcttgttgttgaatttgaggagttggataaaattgttgatttaaacgattttgttgttgttgttgatgaatgttgttattattaacaatattaatattagtattattatttgaaattggagtattagttgtattaccactgttatttgaattattactattactattattattattattttgataattattttgataagtttgataattttgataataatttgatattaagggagattgtctatgttttaaataatcatttgaatccatattatctaattgataaggagtatttgaattaattgaaaattgtgaaggagaatttgaacgttgaatatgttgattatggtgttgatgttggtgttgatattgaatatgttgattatgattattaattaattgatcattatttgattttaaatgattaagtgttggataaacataaggatttgtatttgatgtatttgatgatgataattgttgaggattattagattgagaagataaattacgttgaggataatcattaatagattttaaaacatttgattctgacattaaaggattattagcagcaggataatataatggtgtagtgttattattattattattattttctaaatcaatatcagattttaatttattttgaatattaattgataaaggagattgaattggagatattaatttagataaaggaggtaatgaaggttttaaatcttgttcattaatcatcataataataatagtaagagtgttaataagatgaagatatgaagatattaaatgaagattagattagataatatacgatagaaatagaataagaaaataagaaaataaaaataaagataataatacataatacaataaggtaaatacaataaaaaggatagaacaaagggaaggtaaaaagtaaagaaagagaaaaggaaacaggaatacggtaaataactgatgaaaaatttcaacggtttgttgaaagtaaaattttgtcgaaataaaaaaaagaaattaaaattaaaattaaaacgggcaataaatttccgctagctctaatatactagtactagtaccaaagctaagactattagactctattagtctctcttctcgtttctttttatgcagtctaattattaaatagtcccatcgtccctttctattcctcgtattattatactatactatccaataagattccggtaatcgaccaacgcgctagtaatcttattgggaaaaccgtttgtttcccaattaggccattatgtaaacaatacggctgtttatttatttatttatttatttatttatttttcatttgctattttcattttcattttgtagatctttcttgcagtttcctaagtcaccaggttgttgtttttgttgtctcttgttttcttttcttgctttcgcctttcttcaactgtatctttttttagatcttttctaatctcttgtattattatcgtattttaattattttatctctatcttcttgatctttcacttcatttcatttactatcgtttcaactcttatcaaaccaacagataacactaatacttatcaagaaacaaaaaaaagtcctactttttcacatatcaaaacaaatacaaatacaaaaaaaaaacaaaaaaaaatatacattcacatataatctaattaaacttagcttaaatcaataaatctcaccttagtcattcctttaaatccaatataaaacaacttttattgattctatactactataaattacttatatctatttaatattttcacttcgttatctaattttacttatttcactatcaaaaaaatgttattcaaaaatttattattaacaactttattatcaactttaatcacagctgaagaaacaacaacttctcaaattactgttactatcactcaaactgttttaactcctcaacaatctgctcaaagaaaagctgccgatgatgcttcatctttatcatctgcctctgctgcttctattgcatctgttgaatcagtatcatcagaagcttctgcagcttcagttgcatcagcttcttctgttgcttcagttcaatctgctgcttctgcctgcttctgttgcttcattagcatcaattgaatcaatggaatctgcttcttctgcttcttctgcttcagttgcttcagttgcatcagttgaagctcaaatttcttcaatttcatctgcttcagttgcttcagttgatgcttatcaacaatacatttcttcagtatctgaagcttcaattgaatcaatccaatcagttcaatcaattcaatcaattcaatcatgttcaatcttataattcagttttatcagtttcatcagttgaatctgctttattagcatctgaatcttcaatctcttcaatttctgctgcttctgtatcatcttataatgcttataaaaaatatgtttcagctgcatctatttcttcttataatgcttatttagcatcattatcaaaagaatcagttgcttcagcttcatcagtttcagtttataatcaatcaaaaattagagcttctcaaatttctgcttcattagcaagtaaatcaaatgcttcattaattgcttataaggaacatttatcacaattatcagttcattcagttattgaagcttcattatctgctaaatctttatatgataaaactcatataactaaaactaaaactttatcaaaagctgatggcttagttgctatcgcttcagaaacttcaactttgaaaacaatttcttcttcaaaatcaaattctgcaatttcttcaatttcttcaaattctcatgcaggtggtaattccttgactcctttaactgggtcattgtttggtattgcttcattcattattgcaatgttatgttagattggcaggaaaaaaaataacaaactacttttgatatcttttcattcatttattaaattatctttcaataaagatattttcttttttttaactatatgtcgttcattttccatcaaaaattttatttgtatcattattattttttattgtatacataacaatattttttctttcaataattatatattttacatcatgtcaaagcatatttaatttctaataagcttgattgatttcttttgtttaatttaaatttaaattcttaaattttatttcttttattataattataaaaattaattatttaatttaattatacaagtaaataaaacatttcttgaacctttcattggtttaatacatctattaaatttatgttctttagaaacagttgcataaattctaatattttcatcattttcttcataacattgaatttttgttataatacccataattggaatttccattaaattttcaaaatttcttaattgttcatctaatttccaaatttttaaattaccattccatgatccacttataaataaatcagaatatggtattgcaaatatattagttattccaaatggttgtggtttaggaatttgtaatttacccttttcaatatttttttcagcacttgcattatcaatagcaatttcaggttgaattccatgacttaaccttttagtaaataatggttttttcttatttaatgaccataatgatatattaccattatctgaacctgttacaaaatgtgaatcatcaatcattgaaacacattcaatactaccttcaaaaaatatcggttcagtttcttcttcttcctctttattattattttttttactatatttatcaattgaatcaccacctctaaatgttaatcttgtctcttcagatattttccataacatagcagtacgatctctaccaccaactgtaacacatctttctaaggctaatgaagatatatctaaaattaaatcttgatgtccatataatgtctctaattgagctaattcattaatactataagtacgaatttttaaatctgcacatgcaacatataattgatcagaatttcttcgaaatgataaacttaaaacttcaccctttttatttttagtttctaaaactctaatacatgataaactattaattgaccaaattataattctaccatctttaccaccagttactaaatatttaccatcaggacttgttgcacttgtgaaaatttcatcaaaatgaccattttcagaatgttccttctttaattcataaaattccataccacctttaattgttttcaataattttggatttttcaatgaatctctaatatcccatttacttatttcaatatctttagaagttgtaaataaatatggataactaattgaaactgatgttaaacaattattatgaactcttgtaattttccttttcaatatttcaccaatttgctttgaataatatttataaacccaacctttttgttctgcaacatctttctttaatcttgattgaataatttcatcatctaaatcttttgcatcaaatccatatgaaccatcattaccttcaattcctccaccaagtgaaatttttaaatcatctaaatattttttagctaatcgacgtcttttatcagcttcactctcattctttaattcatcatcttcattatcttcatcaatatcttcaatttcatcaggattttctccaatatctgcaaatacatcactatcaacttcttcctcatccaagtcttcttcttcttcttcatcttcttcatcattagaatgtgctgcaactattggttcatcattttcaattctttgtcttttattattttgatttgatctaacagttgaagttttcctattatctctattctttcttttctttttagaaggatcaacgaaaaaggaatcaaccatgattatattaataaatggttctgtgatactttccaaaagaacaatacctacttccacttctccaacttcaaagaaaaacttttcatgcaatgcaatgaaatataaatttatatgaaaatgaaaactagaaaataattttttctctctctcttagaaacgcagtcgacgcgtctgttccttttctacatgagcatataagttaaaattataatggaaagcgacacagtaatcactaaggtaacctcttggaagtcatcgtgtttgcattctttctctttagttggatcgattcctgacatctggtttctattctctattttgattgtttatatgggttgtataagatgggataggataagataggataggataagataagatataggatagataaacaactctattcctagctaagttgattttcttgaagcagtgagggaaaacttgaattttaaattgatgaataatttcattttatttcgtgttttggcgtttgattaatatatatcgaactttcaataatatctctttttcaaacaacaagatgcaacttgacgataagattacaaatgcttatttacaggagacacccatctatttagaatcagtcgggtttacattacttacagctgcaaataaatcaattaaagttttcaatttagagaataatacaagagaacctgaaattattaatactttagatgaaattaaatcaattaatatccattctaataataataaacatataggtgttgtatcaggcggttttgaatgtggtattcatgatttaactggatttatatataattctaattctaattctaattctaatgatgatactaataattcccaaattgttaaaatttggaaaagtagttctaaaataactcaagcaattttcactcatggtggtcaaagaatttgtattggtgatttaggtgcaaatatgatatttattgatatttcttcaaatttatcaaattcttcaaattttggtaaagtaattgataaaattaaagttaatggtgaaattactggtttatcttatagttattctgttgatttattagctgttacagttgctgatggtggattatatatttattcattaagttcaaattctcctgaaagaaaggcaattgttggtaatattttagttgataaaagattagcattaactaatgaattaggtttaggtgatgatgatagtgatttctctgatttatctgatgataatgatgatgatgatggtttggatataaatgataatgattcaatgtttacagagacaactaatggtttagatagtaaaaaatcaaggaataagaaaactaatttattaaaatttgcatcatcaaaaactgtttggaattcagttggtgatattttagctataccaaataaaaattttaaaattgatttttataatgctgttaattggtcaaatagtatttattcattatttgcaggtgataatttacatcataaggataatttaactgcaatttcattttctccaaataataaatattttgcaagtataagtttagataaattattaattatttgggatttaaatactaagaaaatgattggtagaactataataccatttattggaattgatattaattggtctgatgataaaaatttatcaattagttctaataatggtaaatttttatatattgatgaatcaacatttaaacaattaattaaaccaaaaggtgttacaattgatgaagatagtttaaataataataataataataataataagaggaaaaatgattcagatgatgaaggtgatgatgtattagaatcgaatgatgaagaaaatgatttagaagatgaattagatagaccaagatcacaagatttagatgggtttataattgatgatgatatgaatgattctcataaatatcctgatggtgatgattttgatagttataataagagaagaaataatgatatgatgtcagaatcaacagaattaactgattttaataaacgtgcaagaagagaacaaaataatagtaataatagagtaggaacttcattaaatattagaacaggttggggtaaagcattaactaaaccattttcaattggttcaactccatttgatggatcagatagaagatatttaacaatttcatcaattgcatgtgtttatacagttaaaactcaaaatacttttaaaataactgttttattctttgatgaagaaaaacataaaaaatattttttcgatgatttagttggttatgatatttgttcaattaatgatcaaggagcagttttcgcaactagtggatttaggaaaaataaaggatttatagctagaattgaatataaaaatcatcaaaatggtagaagtggtgaaactcaatggattagagaaattaaattaagaccatatgaatttattacaagtgtttcagtttatggtaaatttattttcatttgtacaaataaaggatttgttaaaaaatttaatattttcggacgtttaattaatatttatatgatggattgtgttattggtataatgaataataataattatgttttcacaattattaagaaaagtattgaaagtggatattttttcaatattcaaaatttagatggtgattatattcaacaagaattaagtataccattaataactgaaaatgatattgattataatatgaatgaaataccaattaagacaatgtttttctcagaacagggtgaaccatgtattgttagaaatgatggaattttaattgttttaacaaaatggagagatattaataataaaccaatttggaaaccattattagatattcaagaaggtatttcaagatcaggtaggagtaaagaattaaaggcatggccattaggattatttaatgatagttttctatttgtaccatttagaggtagtaaaaattatccaattttcccattattaacaccaatgaatattgatatacgaattccaataaattttgttgatccaaataagcaaaaaaggaaagaaattggatctgatattgaagatgatgatagatatgaagaagaagaagataatgaagaagagaataatgttgaaaatcctgaagagaaatttttacgtacaattatacttgcagaaatgttaagtgattcaatttcaaataatgaaaatgataataataataataataatgaaacaattgaaaaattacaattattaagtttagaatatgataaaacattattaattcaattaaatgatgcatgttcaaatggtgattcagatgatgcatttgagatttgtaaattaattagagatttacgtgcattaaatgcagctcaaaaaatttcagaatctaagagtatggcaggattagctagaagaattagaaatttacgtgaagctagaatggcagaggaagaagataatgaaatgtttaataaagatgatgataatgataatgatgtctattaaaactatgtaacttttatacaatattaacctaccttctaccacctctaccacctcttccacctctttctcctcttcctgctctaccaccccttcctcctctactaccttgaattttctctatatcatcattagacaatactaaaccattacgagttgaacgaccaacagattgaatttttaaacctctatctctaattttattaaccttattcaaacctctaccataagttttctctgaagaaataaatgaattatcattatctaattttctaaatgtacctttcttattcttacttaatataataccattttcccttgcatttgtttcaaattgattaattctttccatttgtttcttaatcatacctttccttatattcattggtatattttccatcttatttaattttttttcatcaccattaattgatgataattcatgaattcttgcatctaatgtacgtactcttgccttaccaattattggatcattaagagttttcaatgttaaatttgcacctgattgataattagccttttcacgagtttctgataaatttttaagtaaatgtgattcacttataaatctttgtaattctaaatcatctttaagatctttagctgaatttgttgaatttttattattaatttttaattcttgttctaatgcttcttgtttctttcttttcaattctattaatgaaattggtttacctgattttcttaattttttttcagttgatgtaggtttattattagatggaatagaatatttatcttcaaatttaacaactattggagccatgttgggtagtgatgatagagaactttacaaaaagaagaagaattatttttaaagctgaaaaaaaaaaaattaaaaattaaaaaataaaaataatttttcacgataataaatttcaagttcacttaattcatgttgatcagtagacaatcagtagacaatcagtagacaatgacctaaatacgttgggtgtattgatttacacgatggtaaagttcaaacaaatagtgggtgcaacattaagtaatgatgataatgataataatgataatgataagaataatcaattatcaacaaattatgtttcatcacatagtcccaaatattatgcagaattatacagagataataaaatttatggtacacatgtgattaaacttggaccaaataatgataatgcagcagatgaggcaattaaagcatggcctaatgcattacaaattggtggtggtattaatttagataattgtcaagaatggattgataaaggtgcagataaagttataattacaagttggttatttcctaatggagaattaagttgggatagattgaaaacttataagtgataaaattggtaaggaacatttagttgttgatgttagttgtaaaaaggataaacaagaggaaaatgtttggatagttgcaatgaataaatggcaaacattaacctaatactgaattaagtaaagaattatttaataaattagggtgaatattgtaatgaaatattagttcatgcagctgatgttgaaggattatgtaaaggtattgatgaggaattagttattaaattaggtgaatggtgttatgatatgaaagatattaagattgtttatgcaggtggtgccaaaagtttagacgatttaaaattagttgataaattaagtaatggtaaagttgatttaacatatggtagttcattagatttatttggaggtaatgttaaatttactgatttagttaggtataataatgataataataattataatttataaacctgcatagaaagtttttttatataattgtttaattgatttaacaattgaagttgcaaaataataaccagattgtgttgaatatcgtaataatggacgtaaataatataatacaccagctaatgcaaaactttgtacgaatggcattattatttgatcaattataattgatttgatgattattgagacttggtacatcaacaaaatcatcattttcagctgttatttcatcattaccatttcttttcccattctttgccaatagagtcagtttagcagtgaatgattcctcataacgtagatccggtatcgttatagcccccgtcattgtcattgtctataagatgtatgttataccttaaggaccttcaattaagaaagacgcggcggaaatggttgaaattttcaaatttttccactttccatgaatttagagtaaagtaaagagcttttctattaatcattgattgtttatcttaggaaggtagggtagtatagtatagtgaaggataatatgtcaaaggaacctcagattgttattaggaaagcaggtagggatgaagttgattttattttaagtgatgttgaattatcattagcaaattcattacgtagaattatgattgcagaggtaccaacattagcaattgatttagttgaaattcaaattaatacatcagttttagctgatgaatttattgctcatagattaggtttaattccattagatagtgaagatattgatgaattaaaatatacaagagattgtacatgtgaagatcattgtccaaaatgttcagttacattagaattaaaggcaaattgtgaaattgatgaaacaatgaatatttattcaagtcattttattataacaagtggtgtaggtaataataataatcttaaattaggtcaaccaattattagagatccaatgaggaaaggtattttaatttgtaaattaaagaaacatcaacaattacatgttaaatgtattgctaaaaagggtattgcaaaggaacatgcaaaatggtcaccatgttcagctattggatttgaatatgatccttataataaattaaaacatactgattattggtatgaggaaaatgttgaaaatgaatggcctaaaagtttaaatagtgattgggaggaacctccaattcctggtgaaaaatttaattataatgcaaaacctgataaattttatataaatttagagacaacaggtgttttaaatcctaatgaagttttcaataaaggttgtaatgaattacaacaaaaattagctaatgttatatttgaattaaagaaattagatcaacaatcaaatactgatgataatagtaatattaatggtatggatagtaatatacataataatccacataataatatcaatcaaggtgatgattattctaataatatgggtagacgtacacaatacggtggagggggaacacaatatggaggaggagaaacacaatatggaggaggatacactcaatacggaggcactactcaatacgacgacagaaacagaccaaacagatggtgatggtagtataagacattatacatgtatagttaatagtatattattatgtaagcgtagagaaaattagtattattatgaattatggagaaatatatcttaagaatggcaaattgtatgttcattctttagacaacaagggtatataatggacgctattataggtaagactatatcaattttatcatatgcacaagttagatatgttggtattattaaaagttttgatggtgaaaaaaaattaattacaatttctaatgtacgtatatttggtacagaggatagaattaaaggatagtaataaatggattttaccaacaagtggtattataccattaatggaattacatggtgattcagttagtatgttgaaaataattgatgaagatgttaatactttagtaccaactttattacctgaaatgattaatcctgtaccagaagaagtaaaggaagaagtaaaggaagaagtaactaatgataataatacagataagaaaccaattgatggtaagaatattaagaaagaggatacagattttgattttacaagtaataatgaaaaatttgaattaaataaagatgatgaattaaatgaatttaaatattcatataataaaaaatcatcatttttcgatgatttatcatcaagtgttaatgaatcaaataatgaacgtatgacatggatgcaagaaaaatcattaaatgaagatacatttggtgaatcaagtgttaataattttagaaataagtagaggtagaggtagaggaaatagaggtaggggaagaggtagaggtagaggaaatagaggtagaggtggtagaggtaatagaggtgattacaataataataatagtaataataataatagtaataataataataataatagttataacaaccaacctgaatggatgttttaagtaaagtattaatatagataatgttttatagtattacgaaaaattatatggaaatttcaattattcttgtttcatgttttatattattatttcttttctttctttggacacactccttaagatcaataccatgactaaagacattaatgaaatacataaagaatttgaaaaattacaagttgaagatcgatataattatgcaactatcccaaaggatacaaatcatacaccatataatagatatagagatattttaccatatattcatagtcaatataagattaaaaatcccagatttggtagggatgatggatacatcaatgcaaatataattaaacttggtaataaaagatatattgcaacacagggaccattaaagaatacaattaatagattttgggaaatgattttccaagaattaattgaaaaggaggaagttataatagttatgttaacagaattagaagagaatgggtagagagaaatgttatgattatattagtaattttgatgaaacaattgaaaaatattgttcaaaatatggacttttattaagaaattttgaggaagaagattgggataatggagttgaagttcgtagagcttatatgtctaaaaatggatatgaatttactattgaacattattgggttagagaatggccagattttggaatacctaatgaaaatgatggtaatttagaagttattaaggatagaaattggggtagaaagtgtaattgttcattgttctgcaggtgttggtagatcaggtacatttattgcaagtgattatctttataaattttatgaaccaaaggaaggtgaaacgagtaaatgtgataaaatatatgatattgtttcagaaatgaggaaatcaagggttatgatggttcaaaaatttgaacaatatgaatatttatataaacttttctgcaataaagaaagtacttaaagaactaaatatattatacaaattattgtttaattaattgaattttacgacgtctagcgttaataaaccaatttgataattgttgagctgtaagaccagtcttactcattaaatttaatttctctttactatttggataaggatgatcaatattttcatgtaaccaatttaataaaattgttgttgattctttcggtagattagctctttttttcttaccatttttagatgttattgatgatatacttgatctagtggaagtagttataggtttttgaattattttatcatcatttggtgaaggtgtatcaccaaatgaatgttgagcaacagaagttaaagtttctaatgaagttgaaggagtatttattattaaactagttgatgtattgatattgtttgtagtataaaagaaagaatttgatcttgaatgaggtgaatagttatagttattgatagtattggtattgaaatactactattattattattattatttgtattataattataattataaggagaatgaagagaatctattgaagacattgaatcagaacgaggaggtctcagtaatggaggtctattaatattattaagtaaattattattattattattattagtaaattattgttataatttgaaggagttggtgaagaagtgggagggggacttattgaaagcagtgcagaatttgataaaagagttgctatagagggtaatttaccaggatgatctctcgatgttgacatggttgttcaaagaaaagaaatcataaatcaaaaaagtaacataaaataacataaaatcatcaacagataacgttaactgtcaaatgggaacctgtcaaggttataaatcaataatgaatgaaaatttactaataaaaatttaaaaaacttctctcaaatgccacactgtgagaaattatagataagcattatagatagtgatagtatttaattaaaaaatttattgagaaacactgtgataaggatattggccaatgaaaagagagagattagatagtagatagtagatttatatggagattatggagataatgaaaagatggggggaaagcacagtcgcggcggtgcttatgtaatatttggatattgtgttacgtaataatatattatacatgctacatgctacagttcagttgttagagtttcagcctgtgcatcaactagtaacaacggtggtaatcctctacattctctagctatcccactaacccattcaacacatctcctttcatctaaacttatccccatttcaactctatttaatcctgtaataactaatctactcttatttgaatgtttcctaattacatcacttcgcaatttcttcctgggttacaacaactgccttagcatctcccattcttaaaatttctaataatttctctaattcataatgtcgatgtttaattatttcatcactattactacaaactgtaacaataactcgaacttgatgcttctttccatcttggaacctgtatgtaaaattgctcccatttgtaaaatcatcgtccctgtatcaatcccaatatccatattactcttactattgatactactattagtactagtattaatgcttttcttattacttctccccaccaatcatctccattgggtataaatcaataacccctacctctcccatatcaggtatctccatacgtgggaaacctttggcaatcgtaacacttgatccaagcataattaaatcttcaatactaccaacccattcacaaatacttatattcctcctctttttcttcattgaattttccatttcttcaaaattcccatttttcaatatattcatctcttcttcactcatttgtctacaatatccttcctgtaaactttcaatatcttcatcattaataaatccccgatatttaccttcatatttattaaaatcataaaatcccataatactaatattaggtttcatacctcctaatccactaccaaggaaaatatttataataccattcctataattatcacttatactagtttgataaaatcctttaactttactaatctctaatatcttcatccatttattcttactaattgtgaaaattccaatatcttcaattaatttattacttaaaaatacatgtcctaaaacatataatccaccttttttcaaattattacaaaatctaattaatgtccatgatgtaattggatcatcaactaataataatatttgtggtctccaatatttaacattatcttgtcttaattttaataaatatttcctaacttgatgataaattaatgattgtgaaacatcaccccataattttggtggtgaaataaaatgaattaatataattaatatacctaataatccaataattatacctgcactaataccatcaacaataaacatcgcaattatacttataatactacccattaatgcactattagttgaaaaatatttaaaacttggcctaaaatttggagctgatccaatccttaataatgcacatgataaatttgtaacaataaatgtcattaaaaatgccattgtaataaatgttgcaattttatttaaatctgcaaataaaaataattgacaaattaaccatgttataattataccctcttttggatcatcagttttagaatctcctttaccaaatatacttaatcctggtaaaatttcatcccttgcaatagcttgtaataatttagcagatccaacaataccaacaataattgaaaaaattgatgtacttaattcacctaatactataattattggtgatatattaataatttgtaaaatttcagtatctaaatataataaatctcttggtatacaacatcccattgttataattacaacaaaataacatataaatgtaatcattaatccatttaatgtacccttaggtatactcttggaaggattttgtaaatcacctgacattgaagctcctgcaagtatacctgcagttgcagggaaaaaaataccaaacatatcattaaatgtttcaatattatcaatttcactacctgctgcacctttagtaaatcttggtaataaattatcctttaaaatatcaaatgaaaatccaatatattcaattccatattctgtcataaatggtttaactaaaattgcagaaattggtattgaaataattgaaataattaacataatacataaatatttccctgcattagaaactgcacttgatccaattaatgaaacaataacacaaataaataatattaatgtacaataactaaatctccaccaatatccatcaattaaaattggtttaataattccatcaaattcattaaaattatacattaatggttcaactaaacctgcaacattcattgaactatttaatatttgtccaatatagaaaataactccaattccaccaccaaattcaactcctaaactacggcttaacatataatatgctccacctcctttaactttaccattagttgcaattgctgaaacactcatagttgtcaataaattaattgtatatgataaaattaataaacctaaagtacctaatatacccatttgtccaataatgaaaccaaatcttaaaaaaagtaaaattgataaaacatttaaagttgtaggtaatgtaacaccatttaatgtatttagcttttgatgtaccttaggttcttcaccttcttcagtattattattattattgctattattatgattattattattaaaattgttattagaaccttcatgaatagtaaatgaactactatcacttaataatctttcaatacctggtcttattaaagattctgttgacttgagtttcaattgatccatattttggtgtatatttagatgtctttaatgatgtagttatattaggattgatacattttcgagtctctcgttgtgtattccttggatttcttgagtgcatttacctcaatattataagaaagaaacagagatcaatcaatcagaagaaaagcatcatgcaaccaacagattaaatcaactcatcgatcaaggctgggatagagtttcctgatgcagctacctcttctgtgaaaaaaaatattttttcattttttactattgcttctttttacgaaaatgcaagggcaaaagtatgtggaatagaggacatcaggggaattatagaggtaataaacgtggtgggtacagaaatgggcgtggaaatggtggatatgatcgtaattataatgggaattattataattattcaaatcaacatcaaattccacctcaacatcaatattcacaaaattataatcatcaaacaccaaatactaactataatattaataacaataactaccaacagaattatcaatctaattaccaacaggggtatcaacaacgttatcaacaggggtatcagaatcaacagagatatccaaagaattatccaaatgcaggctatgaaacttcgttaccctgttgagccactcgttaatgaacctgtagatgaaaagaaaagagcaatatgatgagccaatgattgaagaagagaaaaaatatgttgaagaaactgtaaaacctgtcaaatctaataagaaaagtcttatgaagtttaaacgacgtaaagttgaaaagaaagtaactaaagtggaggaaactaatttattcgaaaccgaagatcaacaaaccgaagaggtaaagaaacaatccattacataaagaagtaaagggaataagtccaggaagatacaattagaaaattctaacatcatttgaggaaaagtatttccgctgagcaagcagaaaacgaagtagaagcacaagacgataaaaaccttaatgaagatctcgatgaagatttagataaatacctttcagcattagcaaaatctgataaatcaatacatggtaatattcttactactgaaaacataagtgatgatgacattgatgaaatttataatgctgatttacaattacttaatagtttaaatactgataaaaataagaaaattatcccaaaacatgaattaagtacacaaccaattgaaaaatcattctatatcgaatcaaatttaatcaaatcattaactaaaaatgaagttaaacaattgagaaatcaagatggtattataataagaggtaaacatattcaaaaacctatattagaatggaatcaattaggtttacccaatgaaatcttccaaatattacaagctaataaatttagctcaccaactccaattcaatgtgaatcattacctaatataatgagtggtaatgatttaattggtattgctaagacaggttccggtaaaacaattgcatttctattaccattatttcgtcatttattaagtaatattaataatattactgattctaaaacatttctaggttcatcgcctcgtgcaattatattaaccccaactagagaattatcaattcaaattggtaaaagtgcacaaccatttgctgataaattgggtcttaaaattgttaaatgttatggaggtattagtattagtaaacaaattaatgaacttaaaagaggttgtgatatattaattggtacacctggtagaattattgatttattatgtacaaatagtgggagaattttacgattaagttatgttagctttttagttatggatgaagcagatagaatgttagatttaggttttgaaccacaaattattgatattttgtcaaatttaagaaatgatagacaaagtttattattttcagctacattccctattaaaattcaaacaattgcacgtaaaattttaaaagatcctattgaaattattattggtaataaaaataaagtaaatgaaaatataacaaatagttttcatgttgttgataaaaacgatgaaaaaatggctattttattgaaaactttaggtgtttgtaatactgagagggagaagattttaatattcatggaaaaacagaaaagttgtgatgaaatggttaataaattaatttcaagaggttatgcagtaatgagtttacatggaggtaaagatcaatatgaaagagagggtattataaaagatttacgtgatggaattattaatatattagtagcaacctcaattgcatcaagaggattggatatcaatggattaaatatggtcattaattatgatgcaccttcacatagagaagattatgttcatagagttggtagaacaggtagaggtattaatcatggtgaagcaattacatttttaattaaagatttagaggataggaaagcttatgagatttgtcaagtggttgataaacctgatagtaagattgttgaaatgagtgagaaatggatcaatagaccaagggaggagagtaatgatggtgacggtgacggtgacgggaatatcaataataataacaataaaggatttatttatggattttcaggtcatggacttgagagattagaaagtattcgtaatgaagcacagaatgaggaaaagaacaaatatttagatgatgatcaaaaaccgggtgatcttaataacagtaaacttgatgatgaattaattgattcgtcagttttaggaccagttgatgtaacaattggacaaaatggagaacacgttgcacgtttagagataaacaatcttccacagaaagtaagatggaatgtcacggctcatgaaacaacttcccgtgtagaagaattagcatcagtgtctgtggtgttgaaaggtgtctataaggatccaaacagtaactccaactcaaaggatgaaccactctacatgacagtggagggtccaagcgagatagctgttcgtcgtggtgtgtcattgttacaagaaaacattcgttctaatcttcaaagactgaacgtataattctatatactactaatgtataatactagtgtaaaataaagataaaaataaaaataaagataaaaatttcatcaacttaagggggctcaacactcacctgaaaatttgttgtgttgcaaattcaaatttttctattgtgttgcaatttgacactctgtaatctaataaagacattttcctttaccttcttttcaatttattactaggtatcttgttcatattatcacatcagagttaatcaatacattcattaataaaacattacaataaccatgtccctggaacatccactttcttggaatgacgttttcgaaattgttaaatcatacgatttagataaattaggtagatctcatgaagatttagaagattatagaaaatttaaaaaatctcttgaagctcaaaaaataggtataacaacaaatttacttataaaagtattaaaatggctgcctccggatactgatatgcatatgccagattcagagagtgtgaaattggttaaatataatgatccaaggccatttgctgatgaaagggatacatttattacattaaatgatttcccatattatatatcgaataaaactttacatatgcttgtatggattagattcccaatgttacctgatccaaattcagaaattggtgatattgatgatgatactaagagaataattgagaaatatgtttgtaaaacatttgttgattatgttggattatctcgtgatcagattatttggtggaaaaattatacgaaaattcaaagtattaaagcaattcctcatgttcatgtattagtaaatttagatgatgatcatgatggtaaattggagaaaaaactacggagtttaattggaacaccaggggttttgtttgattatcatactcccgataactcaaaactatagtattttgttgttaaatacatctgcatattacttcattttccatactttattgcttttttttattccgtatatacacagatactatactttacataattagataaacttattcaatatattcctactgattttttcattccttattaccattcattatagaaaggtgtttcttgaatggtaaatttcttgaaacatgaggtgcatataacttttcaccatataataacttacttttatcagttttagcaaactgttttgtagtaagaccgggtattttacgatgaaaatgtctcgtggtacaatgttgaaagaaatcaagtacacttttagtagtaatttccttagtaggtgctggatctaattcatgttttctgtgacattcattacatattaaatgaaatttattatcatcttcaacaaaaactggaattggcatttcattacctgatgcatagacaccatgatacatagcaagatgtgaatcatatgccatacctcttaaattgaaaaatttattatcgtaacaaaatcttttttcataatcgtgatcaacaggacaataaggacataatccttgttcagaaactcttctaccactatcatcagttttgaatctgataacaaaaggttcataaaagttaacaagttgacctgaacatcttaatggtaattttttcaaagtttgttcaggattagaacgatattcccaaccaaattctttatctctacctttaaaatgatcaatattcattccatttggcatgaataaaaagacattggtaaataaataatttgtaggctcaatcccatcaatacctaaattactagcaatatgatgagatttttcaatttcatctttgaaatgtttagtttccataatattccagaaatattctgctgtaccataagttgttaataaatgttgctcagtaacatcaaaaattgaaaactttgaattatcatcagcttctgctaaacgacgtttaaggacttttggtttacctgatttgtttttatttgccttgtaaaaaacagtgtactgtgctgcatttttgaatccatgaactcttcttggtggaatattaagaactggtttaaagatacgttcctctaattcctcgtcagtttccttctttgaagcatcaggaacaatcttaacaagaatttttttaagttcatcgtcagtataattaacatcagaatcatcatcttcagcagactcgtaatggaaactaactcttgagtttgttttcttaacctcctctttctttacttctctaattttagaagaagcacccttctttttacttcttttaatgttttttctagaacttgattcacttgaatcaataaaatttttaccggtgatcttgttgaaaaaactgtgtctattgtgtaaaaccctattgtttctttgaatacaagcttcatcaaacttaatacgaggtggttcaatgattggttccctaagatcaatatcatgttcactatcactacttgaataaccatcagcagcgttatcataatcttgagaggtataagttcttaacattggttgaacaggaatgtaaaacttttgttcagcattagcaattcttgctttttgtgtagagcttcttgtcatcattttgcttgatatgaaacagatgtgaaaagaagtaaacaaaaagaagaaagaagaagagaagaagaagaacatgataaactaaatcaattaaatttgattgattcctgcttgttttatacaaatcataattcacaggataacctctggtacagatactggtgatgaccaaacagaatatgtttgtacaataacattaccataagtggaaaattatttttttgaaaaatcatcactctcggagttgagccgcgttctgtacgttttatcatcaactccgaaaccatataaactatactgtatacgttattgtattggcacttcatgattattattcgaattaatattagattataaagatatatataggagtttaaatgtaataaataaaaaaagtataaaaaataataaataaaaaggtataagtgtgtaaaattaataaacaaacagaatatattttttcaaaggtataataagtattttttttgtttttttaaatttttttctcagtctgtagatttctagagtctaaaacctatctatttctttgagctctagtttggtatgaaggaaaataagctggcttaaatctttccttatgtttcatcaattccaattcagttaatgttgaattcattaatctatcctcaaaatcagatggaggtgaactaccataagttgcacaactttcaggataatctttaatttcaacataatcagcaaatggaataccttcatcataaattgattgtttaccaaaatgattttcctctgcaaatatttcatcaaaataagcacgattctttcttgaatgataataagatgaacattcaatttcctttgcataatatttgagttcttcttcaataattgggaaaactttgatattagtctcctttaaaactacaaatccaccaacaagcaagacatcacaatttgaagcataagctaataaaagatcttcattaagacattcccaacgtctaaattttggatggtatttccaactaaataattcaggtgcaacttctaatataaccggacatctccaagctggatattcaccaggtgctaaacgacctctaccaatatattcatcaactagttgatttgcatatttagaaccaaagcaaaatccccaaaagccaagttcatgacttctataaattctttccttgtaacgtttatgcatttcattataattgaattcttttcttttacctgttaaatcacatttatgcataagtctagaataatcttttggatgagttgtatcatatggaccaggaccatgataaccacgttgattttgaaaaaggaacccattactgttagagtgatcaataaaatgttgccaataaagaagattgtataaatttttgttgaaatcgtgagcaacatgtataccttctggaaagtcttctctaacgacgtaacccataatttatgaatttgaaactttgtttgataaataaagtaaaactaaaaagaaaaacaagaaaaagaagaagaagaagaagaagagaagaaaaagtttaaaattacaaaactgggtgacaagctctccttaaataaccatctccaaaaagcagatcaagtaaaatccaatcattctcagatcaaggtacataacaaccgtgatcacagaattgcctaaaagaacctgctctgctacctgatcccgctaatacttcctaaataggccataacacttcccaaaaaggaaacccgcgagtgaaaatttatttttcatgatctactactaggattacctaattaagaaaattttttgattcatatatttacactatatagcatgccaattcttaacattttttgaagtgtaaacaggtagaataataacatattgctaagtacacatcagtatgggatttataaatcctggtgtaacttatatctataataggaaaagaatcaatgaaaaattacccattaaaaatagagttttcacaaatcataataaactgtacaataaatactatcaaaattcaaattttacacaacaattagcagaattaaacagttcatatgaatttattagagaaagagtgataaagaagcaaaactctgaatgggtattggattctttaatagagacattgaaaaaatatattttaatatcaactgaaatttttatgactacaggactagatgacataacaccattgagtagagaagatgctatcaatatgttaaaagatttaactaaattaaatgcaataaaattaaatgagaaaagttcaaaatatttaaaaaatggaattatacccaattttgaagcacaattcaatcgtaaatttgaaattgttaaaggaggttgtattactctcaacaactttttcgataaaagaactttcaacgagctacctaatgaaaatttctataaacaagacatgtatgaatatgaagatgaagatgagtatattcaaaatattgaatataaaccgaaaatggaaccaagaatgcaatctaatatagaacctaatatggaatctaatatggaaaacttaaaacaacaaaggttaaacaaggagcctgaatttgaagttccaaaacctaaatcattaactgatttacctgatgatatattagtaaagataatttcatattcacataacattgaaagtatttcacttacttcaagttttttccataaatttattttatcacatattgaatttatttcatatcaaatgatgattgaaaaatttgtgcatacatacagtttaagaaacaaaaatcaaatagatgagcatgcaaataatacaataattacagaacttaatgatgaaattcatcattcaaactcacataatatgaaagtttcagataatagagaagagaataataatatggagaatataaaggaaattattagaaatgattttaaaagagatattaatggtaaatttcatacacaacgatatagagatcctgataatttagttattatatcattaactgcatttgaaacaccatttatgacatatgcgatttataaatcattgggtatagatagagttttaacatcatcattatggccagattttgaagaaacatatagtaaagaacttgaaaagcttaatgaaaataatcaaccaaagatagacaaatctgtatttaaagaactttggacagaattaccaattgcattaccatttgtaaatccaaggaatgtgttagatttagattatatacgaactggaatgtatgttgataaattaaggataatattagatttattagtattagaaaccaaattcactaatgagcttgaagatattttccactttattgtatcattgtgtgttaaaattagtgaagatttaattgagaataatggtaattcaataatacctgttgaaattttgaaaaattatggtattttctatatgagacaggaaaaactagaaaatgatgaaacaccggaagaggatgattttgatgatgatgaaacattatggaatgagataagttttaataatccagcattttattctattttaaagaataaatctgatatacaattggaaaatttattatgtccattattcctgaaagatcatatctgtaatgatttgaatttctgggaacaattacattatatggaagatgatgaattgattgatgagataatcaccaagtacaagatatcaccatcatcacatgtattaaactctttggtgttgtgaatagatataaaaatgaaatgaaataaggttttcggaattgatatcagtaataaatccacggagttaactccgataagaaaaattgatggcatggcatagaaaaaaaatattttatctggaggtgtattattaatcagtattttactttataaagtatacccttttatttaattatgactaatctatataccatataaacaatgccatcaattaaagaaactattattatcaatgcaaatgtcaagaaagttttagaaactttccataatttccaaaattatccatcatggtcaaaatttatgacatcaattgaaattactgaaccaggtaaaactgaagaaacattatcagttggtgattcattgaaagttgtcattttcttatcaagaaaaaataaagaaacagttttcacacctatagtcacagagaatagtgaaaaacgttttgcttggaacggtgttttattatcatcatggattttcggtggcgaacatagttttgaatttgaatcaattgatgagaatacaactaaacttattcaaagtgaagttttctcaggttcaatggcatcaccaattttttggatgattggtgaagattcaactgcaggtttcaaattatttaatgaagcattaaaggctgaatgtgaaaaataatttaatatattttacaactgattttttaacaacattactattacattattattatataatatgtataatttaagcaagcaatattacgatatatttaagagtagataaacagacaaaatgtaaatagaatgagagagaaaagcaagaaaagatttaattaataattatagctttgttgctgtaccatattactattattttcaatatctaacgattgttgttgttgttgttgttgttgttgttgttgcatattatgttgtaaattttgttgtaattgttgttgttgctgttgttgttgtgggtatacttgttgtgggttattatattcatcaaaccaagcatgatgtaaagcttgtcttgcacttaatcgcgtatcaggtctcatttgtaataaaccttgtaataattgtaaagctaatggatcaatatttggtattaaaacacggaaatcttgcggtacaaataatgtaaaatttgatttataatttggataatttgaaacacctggccaagtacgttcatttggtgtacccattattctaaaaatttttaaaagttgatcatcatttgaagaacctgaaaataatggtttacctgtaaacatttcagctaatatacaacctgttgaccacatatcaattgaagttgaataatttcttgaacctaataaaacatcaggtgctctataccataatgtaacaacttcatttgaaaaagtattaacaggtataccaaaagctcttgctaaaccaaaatcacctaattttaattgaccctttgaactaattaataaattttgaggttttaaatctctatgtaaaactctattatcatgacaaaataaaatacctctcaataattgatacataaaagatttaacagtacgaggatctaatgcaccatttgaattatatccattcatatccatatatctctttaaatcactatccataaattcaaatactaaagttaatttattttcagtatgtataacatcataaagtgtaacaatattttcatgttttaattctttcattaatgaaatttctctaattgcagttgaaggtgtaccttcttcactatctaaattaatctctttcagagcaacatatgtacctaatgctttatttttacctttataaactgttgcatatgtaccttccccaagtttttccaactgttgaaattgagatgaagttcctgacatttcaattgttgtttataatagatatctataatctacactaaccaaccacacgtgtaaactacttacctctatagatactactcaaataaactcttgcaacaactccttccttccttcctaataataatcatcgctgagtactgttgtgtccaaattctttcaaatggaccgcgtgtccgtcccatcgactgcgacatgattatttatccttttatcgtgtttcagatcagtttcctatggggaagatggaagggtatatgcttttagagaagggttctgacagtgattgagctgtattggtgttggattttggttaaggggaattagggattgtcatttgacgagaaataatgtcagaaagatacgttactgtggatttacactgtacagaacaacaaaagaaggttatagtagaaccaccggggaagaatacacttataaatgtattatctggtccaggtactggtaaaactaaaacactgtgtgatagaattgcttatttgatgagtaatggtgttaaaccttcagaaattgcagttttcagtttaactaatcaagctgtattagattttaaaaaatcattaagtaaattattaggaaatgaattatctgaattagttagtgtttcaacaattcatggttatgctaattctatattattacaaaattctaaatattgggatgttctcaaggataaaaatactttaaattcatcaattttaagttcaattatagaaggtatgtcattaagtaggaaggaaaattatattaaaataatggaaaaattatctcctgaatctgtaaataataatgttaagtatttacctaaaatatcagaaagagaattgaaattgttgaaaggttcagatatacagaaatacaaacaatatttaagtttatcaccacataatcctgtaattaacttcacatcgaaaaattcaaatattatatttgataaattagtatatgaggctacattaatattaaatgttaataatttaatattattcaataatggtattgaaaacaatgatgaattgattaatttaacagatgaatttcgaatacctacagatattttaaatttaaaggaaattataattgatgaatttcaagatttatcagtaattttacttgattttgtacttgaattatctaaaaataaacaattaacaatttcaggtgatatggatcaatcattatatggatttaataatgcaactccttatgaaaatatggaaagattagttaatcattataaacaacctaatcataatttaaaacattttgtacttaataaaacttttagactttcagaggatatacataaattttcattaaatgttttaggagcttcagatacttttattacaaattttccccaatgaaactacagagattccaataattaggaaagaatttacaaatttggttgatgaattttcatttgtttataatgaaattaatcatttaattgaaaattctaatggtttattaacacctaaaaattttgcagttttagcacctgttaatcaagttttagataattttcaaacttatttccaaaataaatcaagtaaatttagatgtaaaaaattatcaggtttacaaccttggcaagatactaaattatcatcagttgtatcatttttaaaaatattagataatccacatcatgatccatcattactcgttgttttaagttttttgaataaaattggaccaagaactgttttatcattaaaggaagaagctgaaaatgataaaatttccatatatgaattaattcataaaaatgaaaaaattaagaaaaaaataggtaatgaaacaattgaaaaattagataaaattttaacaaatattgataaatcagatccaacatcaattatttataatttaagttgtttatcagatttattttatttttctaaacaattgaaaacggaatcattatttgataattataaaattttcttaaaggaattatttaataatttagaagttatctttaaaatagataatgaagaatataatattttatcatatttcctatcacattatcaagatgatttccttaatgttaaagaattagatgatacagaaattgataaatttgaacattataatgaatttatttcattatcaacaattcataatgcaaaaggtttagaatgggatattgtatttgttttatcatcattatgtttaatgaataatgaatatagtattcaaaaatcaagagttaattatgttgcagcaactagggcaaaacatattttatattttaataaatcaaaatttgatcaaatgttacatgttgatacaagtaattcatcaatttatcataaaagttttgttaaaattgaatatgaaccatctttactagattgtttacctgaacttaaaaatttaacaaaacctaataaattaactaatttaccaaaatttgcaaatcctttaagtgatccaaaaagatataaatttagtcaattggtagcaaataaaatttatgctaattctaatagaaattattgtacttttttaactcgtggaattcatttattaaggaaagtttagataacttgtataaagaacattatatatacccaatagatagttatataactaaccatatacataacaatgttacacgtagcaaaaccatgtttcaaaagtatttaaagtgtataaaatcaacgcgattttgctatgtatcctattcttgggtgattaactacattgtcagtttcttcatagcaagggttatatataagtagtgcatgggccagtaaattaaagtagatgatgtatgcagtttcttttcagctgatatagtataaatatatttattaaaaaccaaagagaaatacttaatgatcagtgttgaaattgatgataatgatgaaagagttatctctgcaccaataggtcgtggtaaattattaaaagttattcatcccgattccagcaaaaaggaggaaatatttataaagagatggaataagatccaatctagaataactaaaccacatttaacattatttaattctgatgaatcaatgaaaaaatttaaacaatcagtaaatttaaatgatgaaagtaaatgtaattataaaacttttaaaacacttattaatgaatatttagaaattgaacatccaaatattaaaattttagatattaaaaaaatcaatgaatttaataaaatatttgaagattatggtattcaaatttcatttgatagattgaaaaatacacttcaacaaataagtgcagttaatatatcaaatttaagagaaatgtcatcatttgagacaagattaagatatggattaaagaaaaatgaatcattaattgttaaatcatatattgaaaatatattttatataccatattcacaatttttaagtcaatatgaacaattaccatcatttgttaaatttttaaataaatatcattcaatttcagttatgaattttgaaaatttatcaaatgatgaagttaaatttttaggtagatatacatcaaataaatcattagtcatttattctgatattgaatcaaagaataaacctaaacaatttgaaaataattggaaacaaattgattcatattttaaaaatattagagaagttgaattaaccattcttgaaaaggaagaaagtattaaagaagagtataataaatcattatttgttcaattagaagagaatgaaaatcaaattaataaaaaatcattaaaagattttattttaacaacatttaaaattttcaataatcctaaaacttctaatttagaattattgaaaattatttcaattacaccaggatttgataaatattttattaaaacattttcagaattagttgaaagggaaaatttaccagttattgaatttattaataaatattatgattcatttagtgataaaacaaaggaaaaattattaccaattattaattatattaaaaatattcaaattaaattaaataaaaatgatgcaaattcaattatgattcattttttaaatttttgtaatataattgaatttgatacaaaatcaaataaaaaaattaaaaatcaattagttgatttacatatttggttgaaaaaattaaataaaagtaatgaatttcaaatttttaataatttattagaatgttatatggaaaatgaaatgaaatttaaggaaattccttcagttaataatactattccaattttacaagacagaaaaaccaacttcacaacaaccaaaattaattaatgcaatggttaattttaaattacctgtttcaatatcaattgataatactagtaataaagaaaattcaaaattaaacttaaatggtgaagaagagacaccattaagaagatcaggatctactaagtataaaccaagaccacgtagttggcatgcaggtaatatattcaatgcagctaggaaacttaaataatttcatttaatttagtatagttctttttattacttctttttatcatttttctttttaacaattggcatttcagtaagtaaaaatttgacattcatttctaatttcttatcttcataattataattctgattatttaaaaatccaatattaatatcatcaattgttgaatctaatgtcaatgaaataaatttattatttttgataattccctctcgtaatgctaaaaattgtatatcctttttaacacctaatgcaatagataattttttagatgaacttttaggtaatgtaattaatttaacatttgcaagtgaacataaaactgggaaatgatcatataataatttagatgatatatcatatttacaaacaaataatactttaattttattctctaaatctttcttacttatttgatcctctaatgatttcataatagaattaaacccatataaaacattcccaatatcattaatcattgattgtttagttatatcgggtaatgattttttctcctctaaggataaattattccattgtttaattgatgttaaaatatcagtttctaatgcctgtaataaagttaattgtaaatttggttcaattcttggccaaatatttctcctcgtataaggatttgttaataatggtttaaaaattgttcttttttgaatttcttgaccttttaatgaattatctgatggttttgatgacattttggtggtcaatgaaggaaaagttgatggtttataaaagaattttaagatttggtgaaaaaaatttattcatgtagtgatggaaattccgaaatttgcgaaatcagtggtagcaatggtagcaagtagtgtgatatatgatatatgatatatgatacggtatgatatggtatggtatgatatgatatggtataaatactatagaattataaaaagacctaactaggggtataaataggaggatgtcttggtaaacgagatatattaagagttggagcaggttcaacaattgtaactgaaccaaatcttacagttcttgtatttgaagatgaagaagatgataattcatcttcttcattatttggtacctctcttgaataacttggtaatttttctttaattttctttaatttatgtgaaggtaaatttttaggtaattctaataaattaccattattatcaattatacctgcatcaatttcaggatttggattaacagtatataatggaacgggtctaattgatggattaactaattctcttaaagcttctaaatctaaataaacatcattttgattatttgcaataatatgatttttcaaataatatctataacttttaaataagaaaataaagaaaataattaaaattattataactaacataatcattaaaatttcaaaagttgtatcatttggtaaaccacatttaacaactccattaatataataaccaccatatttacatcttggtaaataaccaactaaattttgtaattgttcattagttaatctatcaggcattgttgttaggaaaagaaagatatgaaagatatgaaaaaagttagatgaagggtattatggttaataaatatatttgaagaataacagaacaggtagtatggtatggtatgatatcatagtatagcatattacagaacagaacattatataggggggtaataattagttttcctaattgggaaagttaagcgaagatattagatatgattacattaaatgatataaagaaagctattaaagtaaagtaatataagagattaaaggattaaaacgtataagaaagtgagataggattagagagaaacaattgattaacttctgtaatgacttttatcaggtaatggaggggcttcaggagcaatataaggaggtaattctggattcatttgtattccattatttcattattattttcttcagatgaagaacctacaatcatagatgtagaaggaggttgataagttctatttggaggaggttgatcaggtcttctataagacatttcatttaatgattgatttggattttgattattatcattgatgtaaggttgttgataaggattatcattaagctctattgaattagtagtagtaggtaatttcattattattattattattattaatattatttatggtactatttgcaggtataaaattaccatttttatcataataaccaacatcttgatttggattagcagcaggagtataagttggtaaattagttacaacttgaccttcataagcagtttgagattgatgataatttggaggtgataaataacttgaaataacaggagctctaccagatttcattcttttaacattaataacacaagtcattataatgaaaactataattgcaagtacgaaaaatgcaaagaaagcatatctacctgcatcaccaccatcactataccacatatctcttttaaatagattattatttttattaatagatcgtataattttattttttaaataattatcaaatgatgatagtatatttgataataaagataatgaattattatcattattattattatcagtattattatgtatacatggcatgattaaaagtagtaagcgaagtgataaaagaagggaagtaatggaaaagaaagagtatactataacagatcaaaaacggtatcaataatatataataataatgataataaatttacccaataagtcctgtataatattaatacagtcattaatatagtgcgtatagtaatattacggagataatcactattttatttccaattattacgtaagtatacagtcacgtgatttggtgtttacgtaactgtcacgtgatactattttattacataagcaacagatacttacgtaattctaataaatacttacgtaaataaaataatcaaaaagaggagaaataatcatgaaccctggcaatcactactccgaaaaaatttaaattttaaatcattatatatcatcggattattttaatacggattattatatattatcatgtcaatattctgttctttaaattctattttcatttcattttcattttcatgtttaatcttttattatctttcacagaacagtattgtactatctttaatcacttaatatattatttttctatcttttcacttttactattcttaacttcacaactgcttttttattctcattctcatcttcatagcacttcttcttttatagagaaaaaaagtttttacttatttctacagccatgccaatacataaaattcatttacctcattctccaatattaaatgataatcctactagtcctactagtcctactacaatatcaacaaataattcagctcataatattttttcacttaatatgaaaaattcaaattcaaattcaaattcatttaatgattcatttaattctcttaatagtactttaaatacttcaattcataataaaatagataatattaataataattataataataataataaaagtcctaaatcttatactcgaagtataagtaatacaagtttatctcattcaccaattttattatctcataatagtagttcaagtataattaataataataataacaataatatcactaacaataattcaattgatttacttaaaaaatcttattcaaatttaaataatttaaattctaatactttctcttcaacttcactgcattcaatgttatcaaatcaatctgcaacaactgaatattctcctaatttaattgaaaatgaatgtggtgatttattgaaaattgttgaattagatttatcaaatgaaaatgagaatgacgatactaatgatgatgataacaatacaactcaatcaaatatagatgaaaatatctctaataaatcaaaatttaatacagttgattcagttcttaagaataataaccatcataataataaaaataaaccaaaatttaatattaataatgatctctctactgattctgaagatagtgaaactgatattgattatgatgatttggaaatttatgaagatttatcagataaaaatcataataatattgcaaatcatacacctttacgtaaagttataacatcaaatgaaatttgtgattcttgtaataatgcaaaaattgaaactttttatcaaaataataatatatcatttgattataatgattcaaaatgggataaaaatgaaaaatgggcttttatagtaattggtttaccagcttgtggtaaatcaactataattaatgatttccaagattatgttaaaaatcatacaaactcaaatataaatgtaaattcttataatgcaggtgatattagaagaatttatgaaaatgaaaatcataataaatttaattttaatgatttaaaatcaagtcaaaaattaagagatttttatgcttttgaagcattgaaaaatttaacaaatgatttaattaataataaaattaatattggtattttagatgcaactaatacaactaaaaagaggaggaaatctgttttagatcatttaaagaaaattagtgatcaaaataatattaatattaaacctttattctttgaaattaaaacttcaaataaagctttaagaagatataatattgaacaaaaatcaaaaaataaagattatattcatatgaatagagaaattgcaattaatgatttccttgaaagaattcataaatatgaattatcatatgataaagttacattagatgaaattaattcattaaatgttaaatattttggtattgataatgttggtgatacaatttattatgattgtggtttagatcatcataaaaatacaaatcatgaaaatttaacttttaaaagtatttcacttaatttactttatcaatttctgattaattatagaactttatatgcaggtgaatatttaactaatgttaataaattttatactgaaggtcattatatcccaattcaaacaattttttcaagacctgtaactcctgatgatttatccaaaatgagattaaatcattcaaatcaattaatttctcaaacaaataatacaaataaaactactaaaactactaaaactactgaaaatccaattaaaaataatgaaatacctaatgacaataccccaaattttcaaggaataatatcaacttgaaataaacacaccttttatgattcctttctttcctctttaactcttatttttttatatataatttatatatccttctagctctaatacctatatataaataaattacgatccaaatcctggaatattacttaaacctggtaatgtaaatggttcatcattcttaacaggttcattaagtgtaggtactggatctgacattttcttttcactttcaggtcctaaatgtgcattatctttaaaactttcttcatcatttggtcttgatctaccccaaaatctcattgatttatcagctcctgcagtacataacatatgacctaatggatgatattcaattgcttgaattgccttatcatgtgcaaatggtattgaatgtaatgcattatttataattggtggacctctattaattatatttgaataaacataattttcaatttcttcattagttttattaccattctttaatttattaatttgttttgtaagatcttttgtttcattatcattattattattattattttcattattattatcattatttgtattaattgtttcaatatctgcagttttatttatattataatgtgataatgaaccatcatatgcaccaactgttaacattgttgaatgaattggatgccatgataatgatgttaaatctgcttcattttcactttttattatagttaaacatcttaacattcttaaatcgaaaattctagttgaatgatctcttgaacatgcagctaataatctttcattaccacctttttgaaatgatgttttactaactgtatgtttaaaatcatgtaatgttgttatacatgaaccatctcttggatcccataatttaactaaattatcctttgaacctgaaacaattaaacctaatgatgaatgccaatcacaacttttaacatcccaatgatgaccttttaaaatattttcttcctttgcacttgaaaaatcccaaatttttaaagtttgatcatctgatccactaacaaatttaaaatcatttggtgaaaatgataattcattaacagaattttcatgtgatttatttaaaatattaacattattaaaatttggttgccaatatttaatacaacctgattgatcaccactaattaaccatttaccattatgtgaatattgtaatgaactaattgggaaatcatgagcttgcataattgattcaaatgaaaaatttaatccattccaaattgtaaattctccactaaatgatgaaactaaaactcttcttgcatcaggtgtccatttaattgcatgaattgcatgttttgatttatttgttgatatatgaacaaatttacaatttaaatcaactatattaggtagttcatttgatgatggtggcatattggttacatatgatgcatcaggtttaattgatccaatttgaaatgcacgtcgacgtcttctattataaacattcttagttatcatgaatttccccactggtgtaaaataatctaaactattcttatgttgttgctgttgttgttgctgctgttgctgttgcaaaagctgctgttgttgttgttgtaagagtaattgtggttgttttgatgatgccattgtcaaaagaaagaagtcttgttatcagggaagttatgaaatttaaaattctgaatttttcaacatgttcaaaaaaatttatatatctccataataaatctttctcttttaaatatagccatcaaacaatcatggacaatatgaaacttgatcaaattaaacatattggtcctatttgtgcattaaaagttatttcaaataatttacttctaagtggtgaaggtccaacattatcattatatgattatatcaaaggtgaaaaaatttttgaaagattagtatttaaaagaaataaaattcatggaattgaaataatcaatagtagtaatgacattgaagatgatattaaaattgtaatttggggtggtagatcattaagtattttcacattaaacaattttaaagacttaaattatgaaataccacattatggtgtaagtgattggattttccactgtttatttgaaaatgaatcaacattacatgttttaaattcacataatattgttcatactgtttcattattaaatgataattgtaaattaatcaacacaaaacattgtggatggaaatcaattctttattcaggtactatatccataaataaggaaactggtaaaattacagttttagcaggtactgttatgaatggtattttaatatgggattttgaaaattgtcaggttaaacataatttaactcaacatgaaggttcaatttttaaagttattgcatctcctgataataaatatatcattagttgttcagatgatagatcaattaaagtttggaatatggaaactggtaaattattagcaaatggttggggtcatggatcacgtatttgggggttaaatgtttacaatatttctaatgatggttttaatattttcagttgtagtgaagattgtacagctcgtgtttggagatttaatttccataataattataataacggtgaattaattcaagaaagaattattttagttcatacaggtagacatgtttggagtcttgatttaaatgatgaaaaaaaattaggttttacagcaggtgcagatggtaaaatatttgtatctgatttaaatgaaagtgaaagagagggttattggggtcataaatgggaattaaatgatatatcaaatgaaattaattgtgttttccaaaaaggtgaattaattaaaaattatagtgattttggatatggattaattgctgttacatctgaaggtaaaattatgattttaaaagattataaaaaatgggaattattattcattgatgataaatttgcaaaattttgtatacttaaaatttttgaaaatgaacctattgtcattatagcaggtaaaatgggtgattgtatattaatgaaattcaatgaaaattgtgaaatagaaatcaaacatgaattcaatttaaatgattcctttaatagattgggtaatattttaattaatgaatatgatggtaattattttgcattatttgaatcaccaaatcctaatgatccattaatttataaaaaaattgatccaattaatttaagtatattagagagttatgaacttttaaaacctaaagataagattactataagttcattagaatacaataaagtatcaaatatgttatttgttggttgtagatttgctacaatgcttgtttatagaattgaaaatgaaaatgaaaaaaatgaaccattagttgtttataaaaatcttttcaaaggtgatacagtttcctcaataaaatcattatatgataattcaaataatactatgctttatataactaataaagatggtacttatcatataatgaaaattaatgagaatttaacttatgaatatttacaaagtagtagaattcaaaaaggatttttagaaggtcatattaagacaccaaatggtgatatacttttgtatggttttaaatctgattgtttctttgtttggaatgaaactaaacaatatgaagtttatagagaaatctgtggtggtccacatagacgttggaattttaaatactggtttgattcaaataatagattaagatatagatttgtttatacaagatcatctgaagttcaaattgttcaacagggagaaccatatgcagttgaattattatcagatggtttacatggtagagaaattagagatatttgtgtaattaattcacaaaataataatgatgaaaaaattataattacaggtgcagaggatacaactttaaaaattagtacattgaaaaatgatggtacatttaattctcattggacttatagagaacatattggtggtttacaatcaattcatgcaattaatgatgaatatattttatcatcatcagctaaggaagaactttatctttggaagattacagaatgtgataataaaaaatgtatgtcattagagagttcattaccaccgagtgaagaaaatcctgatttaagagttatggattttgattctatagaagtatatgataaaattaatggtaagaagattggatttttaattgttacagtttattcaaattcaatgattaaagtgatttattatgatattgcatctaagaaatttaaagttttggtagatgataattatatgcaatgttgtattttccatgttagatttgtttgtattgataaaagattatttgttcttattgcatcaactaatggacatttaagtatttatgatattaataatgttattggaaagtatttcagtattgatgattctaacattaaagaagttaaactttcattaaatgataataaatttgaagaaataaatgagagcaccaagttagataaacttatcattaatcaacagattcatcaatcatcagttaaggcattagatatattacaagaaacaaatggatgtattaaagttattacaggtggtgatgataatgctataattgttagtaaaattactaaagatgaaggtttgaaatttgatattgaatcatttattccatctgctgcatcatcaactattactacagttacagttattgatgagaaaacagttttagttggtgcagttgatcaaagtatcaaattatggaatattgaaaatggattaactcttgttgataataaatatactacagttgcagatactggatgttctgaaattgcatcatttaaaaatggtgaaaaatatttactgattggtggtgcaggtttctcaatttggaaaatcaccaattagtgtataatattgatactttataagctgtagtgaaaattagattgtgtaactatatctatatttataaaaatgtgttagattagataaaaactataagcaggaactaaaattgtaaatttgtgtatatatattgaataaatggtattttttgtacttgtacttctctctattatgcttgcttttgcttatgtttaggattagccttacatagcacatatactctaccttttcttcttgcaatataacattctgaacagaattttttaactgcagttctgattttgtatgatcttgagacattgttcatgaaagaatgttgcatattaatatttgaatgaacgtgttcatggttacaaacatgcttagcggcatttaccgcctgtcccattctttggagacccaatctgaagttattgaagagcattgttcagtgatatacagtcagattctattcaaagacttaacgaactcctaaccataacttactgtaatggtgaaaaattcatgttgaaattttccaatgatttgagaaatttcttctataaggcgtcgcgccgtttgcgtcggtgcgtcggtgggattttcattttggcgttttgcttattgtgagagaaatgaaatgtttacatgatagagattaataagaagaagaggttgctgttggtgataagtggtgagttaacttatatagacaccataagtgaggataatatagtctaaaatggacaattgggcatgggtatgtaaataaattaatacaatttttaatttaaataatcaaatactaactactaaacattaatataacagtttaatacgatatcagtgctgagatatccgaaaggacatataataaatgccaatgatcctcaagtaataacatctgcaattaaatttgatgattcatattccctattatgggttggtaattcattaggttatttaacttcttatagtggaccaaaattacaaatgtatacatcagttaaagcacataatggtccaattctgaaaataatgacacataaaaagggtataatgtcattatcatttgattctattagattaggtactattgaaggtgttacacttttcaatataaaatcagattcattacaaggtataaatgcaatgacttatacatcaaatacacaaacagaattattagttggtggtgataaggataaaacgggttcaaaaatttttcagaattgatacaattaatcattgtatatcaagttctttccattatccacatagtgttgtgtttttaggaaactaacttaaaatacgttaattattggtagatctgatggtaatattgatatacttgacccaaagacaaataaaattttagaaacattttatgcacatgtttcaggattaagtgatatatcagttaaggaaaataatattttaacaacaggtttttcattaataaaagatcaatttagtccagatttatttgttagttcattcgatttgaaaactttcactacatctacaccaattccatttcccgttggggcatcaaaagttttccatcatccattcttacctaatgtaattcttataacttcaagtttaggtcatatgaactttttggatgtgaaaaatccaagtaatataaatatttatcaagctgatgttgcaaattatataactgcatttgatttatcaccatctggttcttatatggcatccgttgatgcaatgaataatttacaattatggaaacgtaattcaaatgataattctgaattttgtttactccctggacaattaacatatcctacaacaactcatgaaataatacccactaaaaatcgtttagtaagttctgattcccctttcaatttgattaaacttcctccattttataaacctttactctctgcttggccaggagatatggttttcaaagttggtaaaattccaaatcaaatagatccagaaatactgagaagttcagaagttataaatggatttattattgcaagatataataaagaaaaatttggtcatagaaatattgcaactaaatattatgatataactgctcaaactgtcgatggtattaatgttccaaaattcatcagtgaaaggattgataatgaagaaaatgaaggtaatgatagtatggttgatgatgattcatcctatggtaacctaccaaaatcaaagagtagtaacattactgatgactctaaaaaagtcttcaaatgatcaaattttcgatttaacttcaattcatggtgatgttccaactgcttataaacaattatctattttatacagtagatttggtgttgatgattttgattttgatttttataataaaacaagatactccggtttagaaataaattctggaaattcatttttaaaccctattcttcaactttacagacatgttgcacctatatttaataattgtttagcagcattatctcatgatgttactgaggaacctaatttattagttgaattaggttatttatatgatatgatgtggaaatcagaaggaaggcattgtgctgcatccaatttccaaatcttattatcacaaattaaagaagttcaaaatttaggattagacaatgaaacaaatatatcaagagacgattttaaacaaaggagactgattcaaacatttaatagatttttattagaaagattatcacaagatgaatgtaaattatacaaagaggaaacatctaaaaatttaaatgaaatcagtggagtcgttacagagacaacagtttactctaatttttgttcattgactcgtaaaagacttagcaatgtattattcaattgatattaactcattacctaccattccatctgttcctacaagtgttactattttaaattatatggaagcatctatgaataaacatattcaacaacatataaattgtgaaaattgtggatgtcaacatccagtcaatgcatcattagaaattaacaatttaggacctgttgttatacttaatcttgatttaactaatcaacaaatgaatgaaattagatatttaaatggatggttagttcctgaattttatttcgcattatcaccattaggtacaccagttttacgtacaaatattattggtggtgttgcatctaatttgaaaaaatatgaattaattggattgtacagttcaaataactaatagacaaaatgaaagtcatttagttacttattctaagattaaggaaaatggcgttgataagtggtacttattcaatgatttcttagttactgaagttaatgaaagtgaagttttagatcattcacattggtggaaaaaacctgttgttatgatttacaaagaagttaatattggtaatgaattcaaacctaaaatctatatggataatcttgataaatcaattctatataaagattgttttattgataatggtaatcgtgaaaataaagttattagttataaattacttgagaaagatgaagaacttgaaacctggtacattagttgcattagatgcagaatttattgaactttcacctgcagaatatgaattccgtagtaatggtactaaaacactagttcgtccaccaaaattattacttgcaagaatttcagttgttagaggagatggaccaagagaaggtcaatgtttcattgacgattatattgcgaacaaatgaacatgttaatgattataaaactacatattcaggtattgttgaaggagatttaagaattggtaaatctgataaaaatctagttagtctacaagttgcttatagaaaaatatggttattagtcaatcttggttgtaatataattggacattggttaagtggtgattttagaatgattaatatttatgttccacctgtacaagttaaggactacaggtttatgtttctatttaaggaaggagaaacgtaagttgggacttaaatttttggctcattatgttttagatactgatgttcaaagtggtaatcatgattccattgaggatgcacatacttctttattactttacaaagaatatctgaaattaaaggaatctggtgatttggagagagttttatataaattgtatcttgacggacaaatatctggttttaaagtgccaacagaggttactttgaagaagtaattattgtttttacatttataaaatgtttagaaacactttttgtaatatagtctttagtatagttttttatagacgaactattgttaggttctaggaagttgattttatctagcagcagattgcaactttacttacaatgtactataaatcaagaattacgtaacgctttgtttacatgtaaagttctgtccatgagtttctctatataaagtacttccattcggttgtcccacctaaaaaaacgctaacaaaaaaaccaactcttgcatgccgcattttgtatgggagcgctaacaaaaacttccgaaacggccaactacgacagatgcaattttttctggatctgcaaacttctgcacttttaaacgcacttaatcatacaacgcgatttccaactggtttttttcactttccaccaagtgagtttctctactaaaattttgaaaagtaaacaaagtaagaatgtaagcaaagcaaacgcattttcagtcgcgtcgttttgctcttttaggacatttttttttttcagttgatccacctagaacacgtaaaagaatcgataagataagaattgcaattccgagaattcggagtaattgaattaatcagtttatgtttgggagatgtttgattagtttatgctgaacataaagaaaggaatggttaatattataatataaaagaagcaattgttcatttttttattaataatctattttctcttcttttctctttcttttatttcctttcacatttctcttattatcatcaaagatgaaatgtatattcttcaatctatttcttagctgttttagctttagctgtttctgtttccgcattggttttacaaaattttgaaaattctaatgcaattgttggcaaacaatcaattgaaaaaggtccaactgttgaaacttcatctggtgatttctcatcaattcaattagttgatgagtctgatgcaatagacattcaatttaccgaaaaattaattccaaattcttatatcattcttctaaaagatgatatttctgataatgcttttgctgaaattcaaattcaatcatttgcaaaattagatgcaattcaacttgatgaatttgtaagctcaattaaaagtattgattttcaatctgaaatgggtggtattaatcacgtttttgattctcttgaggggttattcaggtttattcactcctgaagttgttagttttttgagacgttcaaaggacgttgctgttattgaacttgattcggttgttcactgcaattgaattcacaactcaaagaaggtgctccttggggtttatcaagaatttctcatagagaatcttcaggtttaggtacttttaataaatacttatatgatgatgatgctggtgaaggtgctactgcttatgttattgatactggtgtgaacattgaacatgagaaatttgaaggtagggctgtctggggtgcaactattacatctggagattctgatgttgatggtaatggtcacggtactcattgtgctggtaccattggttcaaaaatcatatggtgtctccaaaaaggccaaaatagttggcagttaaggtgttgaagatcaaacggatcctggcactatgtcagatgttgttaaaggtgttgagtttgctattaaggctcatgttagagaagtaaaagattcaggaatcgggttttaaaggttcaacagctaatatgtcattaggtggtggtaaatctcctgcattagatttagttgtcaatgcagccgttaaggctggtttacattttactgttgctgctggtaatgataatgctgatgcatgtaattattctcctgcagctgcagaaaatgctattactattggtgcctcaactatttctgatgctagagcttacttctctaattatggcaaatgtgttgatatctttgttcctggtttagattttttgtcaacttatattggtcttggctctgcaacttcccttttgtctggcacttcaatggcatctcctcatgtgtgtggtttattgatgtatttcttatcattaacaccagcttctaattctaaattttcaagtgcaaatattactcctaaacaattaaaggataatatcattaaatatggttctaaaaatagtttaacttctattccagaagatactccaaatattttaatttacaatcatgctggtggtaacattagtgatttctggaatcatgaaaagtcatcaactgctcaagatttaattgaaaaattaaacgaatatactgagtcaaatttcaatggtgctaaaaatgaaattaagcatttaattgatgaaattgttgatgcagttgaacatgtcgtttcagctgaattattttgaatagaactaatttgcatttgtttttttagtaagtgtttggtttaggggtatttggcgtttattattgggttaacttttttatatttatgtattattatttcttttttttacttttatattcatctttactaaataaattatatgtagatatacaatagaatgaaaaagatcaaatcaatccaaaaaaaatttgtattttgtagcaagctgaataaatcaaacaaccacttgaaacaaacttaaagatcaactgtccacggataaacaataaaagagaatttattgttgtaaatttagctgttgttgttgctgttgttgctgtaataattgttgatgatgatggtgctgttgatgctgttgctgttgttgctgctggtgttgttgttgttgggcacgtgttgttggatgatatctagaattcattccaacatttgatgaatatgctgaagtatgaggtctattatcattattatagttttgttgttgaccaaacagtgtacgattaccacgagaatatgtattagcaagttgactggtgttattattattattcatattacttgattgatttgggtacctcagattatcttgttgattctgttgatattgttgttgcatttgttgttgttgtatttgttgcatgttttgttgttgattgtaagagtttgaattgtatcttggttgctgttgctgttgttgtttatttagttcttgatttttcatagaggtggtggaatcagtaaacttaatacaattctcattccacatatcaagtaaaattttattatagtcttcggtattagttgtaaaagtatccttcagttttagtttctgcctcttttaatgaaaatcctaaacttttagaaatagattgtgcaaacatctgttgtttgacagattttgaaatatgggatgaatgatcacctgagcttgagccatcaatactaacacgttgtcttatattttttgtttcttgaattctagttaaagattctaaaactggatttgtataacgtctaacattaagaaattctcttgatacttgttcgtattgaaatctggtagtttggttaatataatttaatgcattacggttatttccatcttcagaatcgtttaaagttgcaacattttctctttgaagccaaagtttttgttgagtacgagtttcaagttctggttcctgtgttgataaataagaagataaatctaaagtagaaaaatcaacttcatgtgaagcgttattctgtgtttttgtttgtttagaaagtaatgattccttatttggagactcaattgaacttttcggtttgaacattgtagatgtactcgatgcctctttcattggtgggggtgttgataaaggtgataatgatgactcttttttctgtgacataaaatggttttgacgaggttcaggttcatttacggatctattttgcgattccttaacttcagctggtggaggaactggagatttgatttgatttgccattgagttcttcaggttggtcagttgtagcttttgttgaagattttccggtactttgaacgaaagatatgattcttgacgttgtaatgattgttgcgaaactgtcctttgcattgaatttgtatgagaatgatggacctagatttttattagatggttgtgagttcatattgtataaagttaaaccagattgttggaaaatcaaagaatctgttttattcactgaattagtatcggagacggatgagtcagaagttgtattgttagattccattcctcggtgttatcttcgtgaaaaacattttgtttcggttgattgtcatactgtggattcaaaggtttttcgatgctcctcactcaactggggtgcaggtgctgtttctaaattagttgtttgagataatattttggaatttgaagagttggaattaacattactgacatcacgttcttctccaacagattgagataaaacagattgcatcctgtacattgtcaatgaattgttaatttcaggtaaatcactatctttaggcggtaaatttgatatctcttgtgattttgtatttgattccattgtattatcaaatttatcagttgaaacatccttcggaacatcatttataagatcttgcggtatttcatcggagtttttgcttggagttggatcatttttagatacttcatttaatttagtatccaaagcttctgttgtatgattatgttgaagttcttctgaaaatttcatttgaaactttatccaatggctctgttgcgtttttctctatttcttcacctgacacttcatttgaatcctttactgttggttcagtttgatcctctgcttggtttatttatgtcatttatttcaatcgtagtattttctgtagcattattgacatcttccaatgtgtcttccacctctgtctcctctgcaactctactgttatcttctgcttgaggtatatcattgagtgtatgttcagctattacttccgaaacatcaatgttttctgattctttttctacttctttttctacttccggtgtattctcttcagtattttgaactgttctctctatcaccacactatcgttgatttcatcgtcacttaaatcaacatcagctgtattgatatcatttatttctgtattcacagaattgaggttatctgatgacattattcttctctgtttaattaaaattaatggtttcctactgttattcagttctatattcgattgagttctaattaactctggcctatctttaaatttagtgatactgttgttagttttcaaattagtatatgatgaaacacgagacggctttttattggtcttcactgggaaagttttagtctgacggcgtctacttaaaggagttgttctacgttgtgaatcctccgtatattggcttgtttggggcatatagtagaggtttatgtatcttttgcaaagtaaaagagttcgtcatcattaactggcaaaaatgagtttatcttaatcaaagattcgaaaagcgagaccttagttcttggacttgttgtatataattggttaatatctgatatagtctttcttttaagtgtatattagtaaggaagggacaatggatacaattaatacttttggggagatggatctctataaggtggcagatagatatgtggaggaaatgcttggtaaagacaatgacacatctaagaaaagttctataagggtactacttctagatcgccacacatcatccattatttcactagtttctacacagagtgatttattacagaaggaggtttatcttgttgataaattggagaataatgaaagggataagttaagaaatttagagtgtatatgctttttaaagcctgatgatgttacaattaccaatttatctcaagagataggtaatccgaaatactccaattatcaaatctatttcaataatgttgcatcaaagtctagattagaaagattagctgaatcagatgatttggaaatagttgataaagtagttgaagttttccaagattattatgttttaaacaaatctttattcacaataactagtattggtagtccatatatgatcaataatacatcattatgggatcctaatactcttgaatcaagtattgaaggattaatatcattattattatcattaaatatgaaaccaattataagatacgaatctaattcacgatgttgcatccaaactggcctaatgcaataaattatgaaattacttcaggtaaagatgtgatatttaaccaactgaaatcaaataaagatgtaccaccacttttgttgattcttgatcgaaaaaatgatccaattacaccattactgtttccatggacatatcaatctatgataaatgaagttatgggtataaataatgtgagaaacagtgtcgatttatcacatttaagtaatataagtgaagaattgagaactgttttaatgaatcaaacacaggatttattctatgaaaagacaatgtttatgaattttggtgatttatcaagttatttgaaacaatatgttgatgaatataaaagtaaaaccaagactaattctaatatttcatcaattaaagatatgaaatatttccttgaaaattatcctgaatataaaaaaatgtcattgaatttatcaaaacatatgctgatatccagtgaaattgataaacaaattaatgatttaagagtatgggagactagtgaatttgaacagaatttatgtagtaatagtgatacagcacatcatgatgaagatttaaaagaattggaaactttactatttgatatgggtgatggtaaaaacaaaaagataataaagtgatgaaattaaaatgaaattattaggattgtatgcacttaagtatgagagtttccatgctaatcaaacaaatacactattgaaaagattaaataatattaaatttgataattttgttaaagctataataaaatatgggggtttgaagagtagaatgaagaattctgaaaataatgaaggtaatatatttaataaaattggtagtagtaatgttaatagtggaggtgcagctaatcatgttgttcaattatttaataatttttcaggttcaagtaatgaagatgccaatgcatatatgcaatttgaacctagaattaaaatattattagataaaattaaacaaggtaaattgagtgatgttaatttcccaacaattggagagaatagtaataatccaaagaatgttgtacgtgaagttgttgttttcctgattggtggtgttagttatgaagaggctagaattgttaatgaatttaatttaaaaaatgatgggtttagggtagtaattggtggtacgcagactattaacagtaaacaatttatggaagagataagtgaagtatgttctggaaattaaaatacagttgttgttattactacataaaataagatgatatataaagaacgatatgtaagttagatatgatcattttgccaatcattaagtaattttgttaaagtatctaattgagacactgaatcattgtagcaatcagttaaagaatttttcaatactagtacatccggtgataattcatcattattcattttaaacagattatttttaaattcttcttcattacttaaattaagttgaatatttgagacaaaatccataattgaaaatattcttcttgtcatttcattaagatttatacgtgcacttggtatatttgctctaaaaggtttatcatcagatttatcgacttgaattttatttggtgatttaaattctttcttttgatttggtttcttttgaactgaacgttttaaatctcttctattacttgtatgaggtgatgtttctttttcttttacattattatcatcagtatttgaaagatcttgattttcatcatttgatgttgaacgacttgatttgaaaacgtttatcctttgattttttattggtatcatttttaacattagaatctgaattcccagtcaggtttcatttgtttcaacattattattagtattattttcagtatcaaaattagattttgttcttaaattacgacggaggtctctttcaaatacttcgggtccatcacttgcacttatattgacatcatcaggtgtaacattagcctcctttgcactttctaataatgcttgtttaagttgttctgcataacttaaatatgatgatcttcttctgtgtttacgtttatgaccatcatcgtgatcatcatcttcattattatttttactggtattagcatcggtatcctttaaatcgattgaatgatcagctgaagtattatttattgacttattctcttcattattactcagattatcactttcgtttttaacaatattgttatttttattatcatcatttgaaagattatcatcttctttaacaaatctaccattttttctctttatgccccttctatgattatcatgatgattatcatgaggatttaatggatcatatttactccttcgagtattaaatttatcagtaaataaagtatgaaattgaggtttacattgttcacaccaatatttttcaggtgcattatcttcatccttaattccaacacaataaccatgttgccaaactgaacatttttcacattgaataaagaaacctggatcaacattttgaaaatctgaattactcttcttaggtatttgtaaatcaatactaccacagatacaacgagttatttcctcttcctcttcttcttcctcatctgcatcttcttcatctatcaatgcatctccctcatcttctaacaaatttgcattcctactagattcggatttacttttattacccctagtagtagtaacagattgttttgagtcaataacaggatcattaagatccaattctgtatagtcctcggagtatttcggatgattagtggatcttcttgatcttctagacgacattgtcttcaaaactccacaacaagaaggttatcttgatggaataaaactattattcacctaatcatacagtataaaaaaagctaaaaatatatgcttaatcgacgcgaattctttgcgtcggtgtatttgttatattggcatttgaatgggagttcctatacctattggaagagacactggttgttctagaggtatagacaatagacaatataatgagtggatacggagaacctaagagaagaagagttataacacatagaggaagaggaggggagagccgtagagatacaggacgtgttgagaaacctgcaattacacaacaaattatagtagagaaaccaaaattagagaaaccagcatggatgacagatgcacaatatgaaaaaacgcaacaatcacttcggtttagctgttagtaaggtttccaccattacaactgatgataaggagaatgagacaaataatgggaatgatacaaatttaatggcaagtgaagatttaaatgttaagatgaaatatttgaaaaatattaaggatgaaggtaaggatgaaattgttagaaatttctataatacacaaacacatacatcaaggaaaagtaagagaactgaatctaaaatttatcaattaagatcatttaataattgtattaaatatattttaattaataaatatggtaaacatgatggtacaattttagaattaggttgtggtaaaggtggtgatttagctaaatgggagatgattaatacacgacagtatgttggagttgatattagtgatgaaagtattcgtgaagcaattaagagatattgtaatggacaaaaaagtggtagatttgaatttggtgcagtatttgcaacgggtgatgcatttaaaactgaattaccacaaattttagagaatttttcaatggaagaagtatgtggattacaatttgataatgttagtatgcaattttgtatgcattatgcatttggtaaatgagaatagtgttgaaagtatgttaacaaatgttagtcgtagtttaaaatcaggggggatgtttgttggtacaattcccaacagtgattttatttcatggaaaataaataaattagctaaaacatataaaaagggtgatacaagtgttagttgggggaattcaatttataatgttacattcccagatttagaagggtatgattttgagaagaaaaaatttaagaccccatttggaaatgtttataattattatttacaagatgcggttgataatgttccagaatatgttgtcccatttgaaacatttagaggattatgtgagaaacacggattagaattaaaatataggaaaaattttactgatatgtttgccaaagaagttggggaatttttcggacaattaccgggaccgttagttcaatcgttacagagaatagatggaagttacggtttagacggtgatgaacgagaggcggcatcattctatgtagcgtttgcattccaaaaggtgtaaaatattaagtacttctaaataataagaacctaattaagaaccccaaattagtcggtggaaccattaactaaggacaatatagccgtaataatgaaaaattgaaaaaaacggtgtatctcgcactaagagaaagtttaatttcctattgtttaaggtcttgttcctagatcttagctttgtttagtctctatattagcgtcaaatttatgtcttggtgcagggttattattattattattatagggactttttggtgtttcctgaaaatttatttgtatcttcaacttttatttcttcaacttttattgactctcttctttctttggacaatgccttcactagtatcaggtcctttcaatattcatcacggtgtcaatgtcactcattcatcacctaataatgaagaaaatcgtgtaaatgcgagtgttgttgtttgtgtctgtcgttttgatgcagaatattcaaatgaattatcatctagtcctggtgatattttcaaagtttcaagtcctgatattgttaatggttggttattagttcaatcattatctactggacagaaaggttgggttcctcatcataatcttactccttatgatgttttctctgataaaaaaaacaataataatgaaaaaaagggacctccattaccttattataatgagacacctagagcaactcttatgaccccatctctctctgcaaatactcgtgaatcctctttatcttcaaattctcttctagattacttatactaatgatgcatcttcatcaatatcttcaattatttcatcaaatcaaaattcaccttatacttcactatatgttcattcaatgttttctgtcaatgcatctttttgttatagaatagatttatcaacttcaactactagtactttccatattgctcgttattacagtgatattaaaactcttcattcatatttaagttcaattattttcagtatgaatgcatcaaattcctctaattcatcctcttcttatacatctacatcattttcatcatcttcacattcttcctcatctagtactaaattgaacttacccatacttccaaatccaattatgttagatccttaccattctgttgaaaatctgtcagaaagtatatctatgatgaataattatttacagaaagtatttaaaatgttcaataatacatcaaaccaatcacttcattcagctttagccttatttctcacaccatccggtaatgatttccaacattatgctgaactttcagatgaacaaatttggaagattttaaaacctaatgaaaggaaaacaagttctagttctagttctagttctaattcaaattcttataaaagtattgaattaactgatcttaaatctgattctccattaccttcaccagattcttatctctcaccgagatcgttctctttctctaaaccaagtattaaaaaatcttcaagtatgatgtcaattaattcaaaaatttcaaatacttcaacaatgaattcctcaacaactctgtcaactaatcaaaatagaagttcatcaacttcaacaactcttacaaattcttcaattcgtgttaaaattacatataaggatgaatattctctgttaaaattagatttagcaaatctttcatttaatgttctatcagatgcaatttctagtaaaattaaacatactggtccattgacatttgcttataaaaatgaaaataatattttcgtacttttacgtgatgatataggtttaaataaagctttagcttgtaataacaaaaaaatggttattaaagttatttgaaccgtaataatactatacaataaacttaatttcctgctcttgcttttgctttctttcttttcaataatctataatttatctcttgcttttatatatcaccaatgtgtacaatataccaaaatctattaagttacgaaaattgcgagaggtttgaaaattgcgagatccactgtcaaccttaatttttttcattttgttctcagatttgaccagatcttcagactcttttgaatgtaacagtctcttcttattcaacaatgaaaacatcaattacatacttacttttactagctttacaaattgcatttactaatgctttaacatgggaattttcagcgaaaaatatttattctggaacaactatacccctttcaaccattaacattgagaataaaattagttttgaacttttagaaataccagaagaatttaccaacaataatgaactggattggtgtttatcattgaaaaccgatgatgaaaaaaagtttaattgttttgtatttcttgataaactaaactttcgtagctctaaaatcacaggtatgttatcatttataattgatgaaaataagttaattactgatgtaacttatttcaagaataataaagaattgagtttgaaaatatccaaaccctatgagattccatatccacaattagcgttcaattctcaagtaggtgctccattgacaactcatgttgaaattgaagatgaagaagaatttgatgaatttgatgaattacctggtgaaaatacaaatgttgaaaatactgataataatgatgatgatgaatttcaagaaattgttcgtccaaatagactctattctggtaacaagactttcattgaacaatactggatgtacattataccaccaatccttttattcatggcaatgtccaccttcggtaaaagtgatccatccgcttcccaattgggaaactaagtttttcccaaaaagaaaaaaaaattcaaaaacaaggcaaatcattcaaatctgctttatctattccatggatgtattatgtatttcttctattgaaacagaaaacattgcttaatttaaacttactgttatgatattaaagtatatgaggtttagacttgtactttttttaattatttcaattttatcaaaatgtgaaagtcgtggtataacttcaaaattaggtgcatcatgtttgtacgttgcagcaaattttacatctttcccatttgaatgtgaaatgccagatttatcatttgcatgtagatgtcaaaatcaaccttttttaggaactgttacaaattgtattgaaagtcattcaaatgatccggttgaactttcaagagcttataaacaattagttaatacatgtaaagcgcaaggtggtaaagaatggaattttatagatttagttaaagttaatgaaaatgcaacaaattatcttatggattattcacttttaccaactccaaaatttaaggcaagtttagtttggaaagcacaaaaaattcaaaaaattcaaaataaaaataatcttctcttaaacagtaataatgataataatgataataataattacattaatgatgttgtctcttctagtaatgttgtttttgatccgtatgctggttctcatgatataaatattttatcatccaaaaatgatggtatgattaaaaatggtaaagttataggaattgaaaaaataccaaattttgataatattgatgaaattgaaaaaatcggtatttctaatattcttgatactccaagatacattttgcgtaatccagtgattgttcctgatgaattatacaatatttctcataatagtgtttcaaaattattagatcaaagaaatttagcaactgtgtatggtggttatatttatttatattggggatgtgttatgcttatttcaatgttggtaaatattagtcaatggtgttccccttattatagtaatagaattgctaaaacgggatttgcattatggtgtaaaagtaaaattatttgtccacaaatatttaaaccaagtaatgttttgaaatatagatctaattcaattgccaataaaactttaaatgaattagttgatggtcctatgggattatttgattctaaaagtagaattaaaactcaaaatactcaaaccaaactattaagtgctgatattttcgattcaaataataattccaaacttgatcaattgagtaagaaattgaaacttttaaagaaatcaaataaggaatcaaaataataacttaaattccaaaattaacagaaattgtaaagaaaactttttaacttcaatttatactatgccagttagaatgcatgcaattataattttaggttatattgttttgaatgttgttttctgttgtattgaatatgaaattgtttaccctaatactgttttcacttgtaaaaaaggtcaaaaatttgtctcaatcgctgatagaacagggtattattgcaactgttcaattaccattggtttatttgttttcaacaagaaataatattttctctaaattaacaggtttatcatatagatcatttcaaatgtttcataagtggacttcaagagttgtatttgtattattagtattgcattgttcattttatctcatgtttgttaatgttagaggtgattatatcgatagatgggggcttatgaaatggagatgtgcaaataccgcatttattgcaatttgtattacaatgggctatttcatttggtagaaagtttttatatgaatttttcaaagttacacatcaattattattaattatattttcagtttgctcatggtatcattgtcttacacttggatggattgaatatttaggtgttgcatatgctatttgggggttagaatatttgattagagtaagtaaaataattgcaagtggttctatattgaaaggtaaatgtaagattatttatagtactgctgcatctgatgggaatggaagtgggactgaaaaaacggttcaatcaattagaattgaaattaatcattcaggatggtggaaaccatatcctggatgttattgttgggttaaatttttaaggtttaatatgttttgggaagcacatccatttacagttgttagtgctacaaatgctaaaaattataatcaacttgtttttgttattagagttaaagatggaattaccaaaaagttagccaatcatattagtaaacaaccaaatggagaatgttcacttaatttattagttgagggtccatatggtaataatattccatttaaacaatatgataaaagtattttaattgctggaggtgttggatttgcagttatttattcaattacaatggatttatgtcaaatctatagagcacaaatgttaagaggtaaaaggaatggggatgattttgaaaattccaacaagaattcaagaaaattaatatcacttatttgggttataccagattttgaaagtctaatgtcattcaaaaatgaaattgagagtttaagtaattattctgatgttatggaagttcaaatatttataaccaagagattaaagaatgaaataatgcaaagattaatcgagaagaagaaattagttaatccattgagtattttatgtggatcatatacttatggtggtatgaaaggattagccaatgcgattatagaaagtagtaggattgaagaggaagaaggagaaggagagactacagaaatggaagatcattgtgaggaagaaaaacttgatttaaatagtaatattgaaagagtcattgttaatgagaagagtaattcaagtgatttagagagatgtttagatgatgtacaagtagagcaattacgtgaagagattaaaatgcttgaatggttaataaataataataacaaggaaattaatattaattttgaggataaaccatttatgcaagatgaattatgtgaattcattcgaaatgattatgatgataagccaattgccttaattgcatgtggaccaactaatttaaatgttgatgtaagattaagtgcagtgaaatgtttagagaacggcatttgtgttgattattatgaggaagagttattatggtgaagaagattacgtaacttttttgattgtaataattataattgattgggaaaatgtcttatactaagtgtttttaagtgtataaatgattcttttcttttagtaatattaaacatgagtaagagtgttaagagtacgaaagtaaagggaggtgataagagattagaacaaattggagatgatatttggaagaatcgtacaactaagatcaataatgaattatttacaatgacatatggatcaattgttggacaaatttgtagagaggaaaattataattataataaagttaatgaaattttatttaatatgggatataatattggaaatagattaattgaagaatttttaagtatttcattaattgagagatgtaataattttaaggaaactgcagaagttataagtaagattggatttcgaatgtttttaaatatttcaccaattataagtaattggagtattgatgaacaaacatttcagttaacatttgaagaaaatccattagctgaatttgttgaattacctgatgaatatgatgaagaagaagaaaataattcaagtagtaatataaagggtaatgctcgtggagaattatggtattcaaatatattatgtggtgtattaaagggatgtttagaaatggtacaattagaatgtgatgtttggtttgttagtgatgttttacgtggtgatgataatacatcaattaaagttagattaattaatattttaagagatgaaatacctgtaggtgatgattaaataaatttataagaataaattaaaagagaactaaaaattatgtatgaatcagagattatcggtttatctttcttaacctttcggctgtcaggtaatgtagataaggaaacgattaaatcatcattttcatgtagatagaagagaaagaagaagtagtaaaagtatgttaaaaattaaatagtatttgcacttaagatactgtgaaaaatattatgtgaggctttgagggtagtgtgtagggttttatgttaatgcctataggattattgttgagtaaaagcatgagtgcagtacaggaacatcgtatagagaatgaagaacatgaagatgaacatagcatagagagtggagaacgtcaggggagtggagaaagtataccgaatgatgaacacttagatcatgaaacagacgaacatggtgaacatggtgatgatgaggaggatgaggatgaggatgatggagaggaatatggaatggattttaatgaatatgaaggagatagtgatataagtgaaggtagtgaaagtggtgatagtgatgaaggattagttgtaccagatatgggtattacaagtgcaccaagtatggcatcaagagttagtggagagagtgatattttcggtcctgaagaaattgaaagtattggagatgatgaagaaagtattgatgataaaagaggtgaatttgtgtcgaatgcaaggtatgaagaaagtataattgatggagatatgttttcatttgttgaaaatgatgataaaagatatgaaattggttatgaaggtggagatactgaagtagaagagggtgaattgactgaggaagaatattatacggagactgaaggtagtgaaggtacagatattggtgaggtggataatacagatacagaaactgagatggctacaaggattgatacagaaacggggactgatgcagatgaaacgaaggaattggattctagttttgatatgagtaaagatattgaacttgatagtaaaataagtaataacacagaagatgataccagtactaaaatagacacagttgatattccaattattgataaggaaattaagaaagaaattaaatcaacaaaagttaatgaaattgatatagttaaacttttgaaaagtaataataagaataaattagataaattaaaggcaatacaagaggaattaaataatgttgatacaggacttgatgaatggttaaaatttaatatgggtaatagttcaagtgttgtagaagaagataaaattggagttcatgtacgagaagctttaaaaatgcttgaagaaggtacattacatggtaaaaatacaccacttggaagttcattaggtacatttggagataatattggtagtgttgcacaaggattacatgatattggacttaaaagtaaaagtaaaattggagtacgtggaaggacattgttacgtaaattaagaaaacctttataataatggtataatggtataatggtatggtgatatataatacaaactttcccataattaaatttatttacttacttacttatatacatatactgatatttgtataaatatcataaaactaaaaacttaatgttttatagcactttttctaattgctatatctaattgatttctaatttgtatacaaccttcagtacctaaattaatcattttttgtaatttatccaaaggagttttagattccattaataaaaggttaattttagaatttgatatagtaccaattgtaagataaggtaaatcaatttcttcaattgcattacaatcaattaaaggtgaaatatcatgaataccaacagttatagctgtaacagtatcatataatgcaatacctgcatcaactaaagcagcagttgctgaattaacacaagctgcaagtattgaaccatcagcacttaatatagttaatttaatattaatatttgtacgaggataagctttttgaacaattgattgaagtaaagttctttgaaccattaaagataattcagcaaatcgacgatcattttttgaaacttgaacacgatcacttttagcataaggaggttgaataattgaaactgataatgaaagacctgaatcattactatcagttggacctcttaataatgataaaacttttgtattacccattgaacaaattgctgaaccatcagctgcatgtggatgagtatttaattctaaactaaaatttcgctgttcattacaacgacgaccatcataacgaaatccttcaggtgatagtaactcttgatgtgacattgcctgtaaaagaaaagatctgaaactctctgaaaaaaacttttcttcttttctatatcaaatctcttctaacaatcatgtacagcactgccacattaactactaagagcataatgaaaagcaccgccaccccactgacattaattgccatcatactgcggctgaggaaaaacgtgttgtttacgtaatagtttctgaaagacaaagtggcggtgcatgtggcggtggctgccaatattgttgttataatggaataaactctgttagatgattggacggtcgacgcagctgcaaatagagccattcctgcaattaatattgatgttgcagtacgtattgacgctaaaagtgatcgttcattggcaagttgatctcttgtctgtgaatctctattatcaaattgtggggcaaggtatttgactatgattgttgatataattgttaaattgaattttatattgtcaatgatactatttgtaccatacattgtactcattttattggatttgattgtgtatgcttttagattattatcaagaaagaaaaatgtgtgattaattaattagattagattatcatatattttgtttcattattttgcattgtatattactttattattattacctttgtttctttatagcttttcttatattatactattataatatcctctattattatattatatcctctattattatattatatcctcaaatcaattaatcttaatgtccgatactgaattatctaataaaactactattcaagctgatcctatcaccggtgctgaatctacaactgttccaactgaacctgcaattcctgatactacaccagatactactcaattaccactacaagatgttttcccggatattgatgtaaaatatattaaaatggcattaattgcatctgatggtgatcttcaaaatgcaacaaatgctttattattcctatctgatccaacttcagatatcccaattccatctccaaaggttatacaagaacctccggtttcaacttcaatttctagttcaactccagttgaaagaagaagatcatctacacgtcatatcccacattcaactacaagagtccgttcatcaaatccatctcaaagacaagttaatacttatttagatagggaagattctgatgatgatttatacaatgtattaactaaaaatgttaatgaagcaaaacaaacagtttcttcatggtttaataatgtttcaaaatcttttgatacaactataaataataataataataataacaataataataattataataataattatacttcatataaaccaaatcgtcaaccatttcaatcacttcgttcaaatgctcctcatactgaatattctgataattctgattataaccctccattaccttcaagacctaatgaaaatactccaaaattacctcgtcgtccattatattctgctgtaaatcattcaaatggttcattaatcaatgattcaaatgatgataaagaaattgaatctaaattaaaatcaactacaatttcagataaaaacactaaaccaattacaatgactgaacttgaacctgaacctgaatctatatctacttccaaatcaaaatcagaatcagaatcaaaaaccgagtcaaaatcaaatgataaacctgaacttgaacgtgaaccttcaactccggaattcttagttgaagatagtgatgaagatattaatcctgatgaaattactaaataataatattattatatacctttttataaattatattttacaattttctaaatatccactaccagtataaacactaccttcccataaaattgtacgcataactttatgtaaaacttcaacttgaaatgcttcatatgggaatttttcaccatcaacacttatataacattttctattcttctttggtataagtctatatgctgaaactttaaaatgttcaacacaatcttcccaaacatgtgtacctttatctaatgataataatgctttactattttgcattgccttatatcttgaatcaaatacaactaaatcaattaatccatcatttggtaatgcagctgggaagaaatttgtattacctgaaacatatggcattttacctgcataaaatatatttgcattattactaattttttcatcataaatttcccaactttcaggtaaattatttatatttgaattattttgaaattcttcattatattttaatttaaaatcttcttcaattaattccctatcttcaatatctttaacattctcaaaatgtttaataatttcagaattatccctacaaaccattttaactgctaaatcaaatggatatttcctattatttaaaacttcatatgcaacacctaaatcaaatcttatactaccaatacttctaatccattcagtaccaatatcagcttgtgcaattgcaccataagtttgtgataaaaatgataaaataatttcattatttgattctttactaattgccattaaatcaatttgacttgatttaccctttaaagctcttaaaattgctaatgatgaacttgttgcacctaaacatgataatgacattgcattacctgaccctccaggtatttgaactatatttattttactaaatgctttacatttatcttcacgtttataaaatccattaataacttcatatggtataccatccccagatgcacataaaatcatatcatatttatcaatatcaatattttctgcaatatctgttgcatgtccactatattcagtatgttgaactgtaacttcacaatgactaccaattataataggttttgcttgttcattatatattttaacagcttctcccttaccactatgaggattaattaaaacataaattctaggtcttttcttactgaaaggatatgataatgacataatttttacaataatatcatcaatggcttcattatcattctcattttcattatcacagatttttaacgttatattttttggtatatattcacgttttgcatcttcataaggtaattgaaattctaatgattggttttcagttatattcattttaccatcaattggatatgcaaatgtaatttcaatttctccattcataattgatgttgccttttcaacatgtaaaatatttataaatggtataaaattattagcactgtttacattaaaatttgatgtcctagtagaaaatggaactgaaagacaacatccaatagatgatgaattatcattttcataagcatttaatgttaatggttgaccatatagtctaatacctcccttttcaatatctatttctcctctcattgtctaaagaagtttaaagaaagaaagagacatagagttaagatccacgaaaaataaagacaaggggctaacagttttactatatcattatctctctaatataacggttccgtcaaaaaagtaaaaaagtactcagatacggttataatataaaaaattaacgtcagctacaggattcgaacctgtgcgggcagagcccaaaagatttcaagtctttctccttaaccactcggacaaactgacactttttatttttatcatgctgttgacttactccataaaatttttgcacgtgacttttagcgtttaaacggtaatatctcaatatttactaaacattttaaggttttatttatattattttaaagcttaaaaagtaaacttttactgatttgaatcttgtctttatagaaaagaaaaaaagttttttatgatttgattggaaagttggaaataaacacgagtttcttcaaatcaatttcaaaaagctatttacaactactttttaaatacttcaaataatcagttgaatctattttattaatttacaaagatacaaaaactaaaatatcttaatttccagttatacgttcaacaatcaatgttacactattataatatttcttcccttttaatgggaaaccacgtaaaccatccatatcattccaagaaatgattaattctttttcatttttatcttctttatgctcaataaactccatatctaaatttaaactgaatgtaataaatgatcttggaatgtatcttttaacacacattatttcaacacatatatcatttgtaacttcctgagaatctacttcataaacattattaattttggtatcaacagtaatatgaaatttgacagctgcatccattgtaatattaccaattttaatttgaaataggtttctacttgttgaagatctattattaattgtaacacttttgataaggaatttagtagtttgtgatgtgaatttcttaaactcattttctcccatagtacaaacttcttcccaatattttatatatcttagttgtgatttaactgtaacagcattattatagacatatctcctctgagagaaaaattcattagcttctctagcattaatttgatatatagacattaatataacattagttaaggtacctgttctgcctttcccatgcttacaatgaataaaaacaccattttgacctttactcaaatcaactggtttatttaaaaattctataacaaaataagccaattcgattaaagtatttaagggaataacatgataatcaaaccaattaactttataaacttcaatattagttgaagaatgttcctcaatttcatattcatccttttcaccaacaagatcaataactaaaacattttgaaaatttttatgtaagaaatcaaatattttgttaaaggttgaattattattgaaaaagggtataaattgttgagactttggatatgaaccaacaagaagattaggtaaaatataaaaaagatctatataaggcaatgcttgctgcactttagtgtctggtaagccagtcatagagatagaaaaggaggaaatagaagaactgaaagaaccaaaagcgatattacccttgttttaagctttgcaatggctcagcaattgtcttatacaaagtttaaacgctgagccgttatcatcttttcctttcggagtttttgctggtctcgcaatattgggaatttcggaattttcatggatttttctcgcaacatgtacattttcatttcaacaatattatatcggtacaatctgaaaaatagtgatggtaatacgatcatacgaaatgtttgatgacaataatatgaaaataataactatgaaatcaagaaatctatgaaacaagaggcttttgtttcagaaaccaatctttagattggaaacgtgctaataattcaaaaactaagatccaagattgcacgtaaatcactgagtatctacgggaacgtatagcttttggattttttttatcgttttagaatacttctaaagtttctgccataattataaaacaatcaataaaataagaaatacaaggggttaagaagtaaacaccgatatttcatgtggagaatgtaaatatttttaccattttgggatagcaaagggaaatttcaattcagagaaaacttttaataacaattaaattgaaaagatgatgagaaattattttttcattaataaactttaatctttaaattctgatgtcagatgaataaaaaattgtaaatcacgaaaagaattattgaaaaattactacatcaagacatcaaaggagccatttctaacaacatatcctatttaggaagtttaattggatatattattatttatcaattaattgattatgaagtatgaaacagctgattaaacagaaaatcactatgttcaatcgtttcaaaaatttatgaaacattgatttcatgataatatgataaaccttttaattaattcaatagtttatcaactagttctaaaaactacttaagaagatggtatcctacaagtttttgatgcatcatgagttcttgttaatattcctttatcatcaaacaatcaaacaaaaaaaccaaagaacattcttttaacaatgcaattctcaacttcaagtttattatcaatcattatggcagtttccactatggctgcaccaattgctcaacctgaagcaaatgcaaatgctaatgcagttgctaatgctgacgctgatgcttggagatggcacatttggtttagaaaccaacctatctacaagagagaagctgatgctgatgcaaatgcagttgcaaatgcagatgcagatgcagatgcttggagatggcacgtatggtttagaaatcaagcaatttacaaaagagaagctaatgcagatgcagatgctgacgctgatgcttggagatggcacgtttggttcagaaaccaagcaatttacaagagagaaactggtgctgatgaagatgatgaaacttctggtgctgatggtgttgtccttcaatctgaaactgctgatgaagaagaaccacttggtgttgcttatgctttctcagatgattccgatgatgctgaaccaattgctttctacccaatttatgcaagtgacatggaatctcaattagaagatgcacaatcctcaaattcaactgaaactgattcattaaccaaaagagaagctggtgcagatgcagatgcatggagatggcacgtatggtttagaaaccaagcaatttacaagagagatgctggtgcagatgcagatgctaacccagatgcttggagatggcacgtctggttcagaaaccaagctatctataaaagagaagctgaagcagatgcagatgcagatgcttggagatggcatgtctggttcagaaaccaagctatctactaattatttagttggttttgaaccttaaattaccttatttcaatctttttccccttatctctttataccgttcttttgatatcaaacctacttatttactattttaaattatatataacctagttaattcaatcattataagtaactaaatcctattaatccagtaaaatttcaaatctcttaatatataactaatcctgatcaatgaatatattatttaccagccacaattttcaaaaatatttaaaaatatggcggtgccaaactgttcaattacatcaattatacctcttttactagataattattattgagatttaaataaataaattggtataatcgcttataaatgaaataaataaaatataaaataaaatgaaatgaaacaatcttagcctttggatttcttgaataagttgttaatgttatgtaacttggatagatatatctctcgatgtttcaagaacttctacaaaactcttcaccaatcgtaactactcatggcggcatggggagtatttatacacatacgttcgggcgtttcaaaccttactagcatttccccgttaatgcaaagtcatatgatactactgtaaactattacctgtttactccagtcatggtatctacgggttgaatcacaatgaatccccgatatacctcatgactatattagcccattggtatcacctgttatacatacagtatacaatacagtccatatctccgtggatatatatgacacatctacgagtctgtcatacatatatggcacatacccatacgacggtccagtgataaccataatatcatcatcatgtcatgaaatagtaattattgattaattgcgtactgcaacatttgtcaaccccaagatttcaatatagcgggtaatttcctcaattcctatgaactattgaatttgcattacctaatctcaacaattatatagtaatgtatatcaatattaattttttaaagtctataaaataattttatttaaagtaaacaatcttatgcaagtaaatgttctaaggattcacccataagttcttccataatctttgctaaaccttcacgaacttccttttgaacatcatcatcatcatcttctaataattctgcaacaattggaacaagttgtggtaataaacttaaccaagtttcaccaatacgtttgtaaatagttgtaagtgccttaattgaccagtatttttctcttgctaacggttctctatcaccaataacacgcatatgagaaacaattaaatcatttaattctttattatgatcatctgatgaggaaatatcttgtgctaatgcacataatgatttaaccaagaatttaccaatagggaattcaatatttgtaagttgtgcagtaagagctttggaaattgagctgaatcttgaagaaacttgccagtactcagtttgatcatatttaaatgatgatgttaatgacataataaccaatctacgaagagagatattttctaatgcaccagttgagaatttttcaagtaatgcaacagtggaatcaagaatgtaactatagtatgtggtaacaattgatcttaagttttcttgtaatttattgaagaatttatagaatgattctaatctttcaacttcagagatatcagttaggacaccttcaccatcaaatgcccatctaacaaccatacctaataatggtctaaatgtcttatcattcaacttcataacatatgcaatagcacatgagtgaatcattgattcaactctaccaatagtatttttatcaaatttagatacagcacgatattctaatgagttggttaagaatttgaagaataaagtagattcagagacagcagctgatttagtcatattttcaacagtattttgcatagaaccaataaatagacctaaagcagtagcatctaaagttgaagtaaattcccaaagtgagcataatgaagagagaacaattttagcatcaacatattcaacaatgatatcaaaaacatttgatctaacagaatctgaaactgcacgagctcttaacaaaacctttaaaatatctttaatatttggagttaaaaagtttggaatctttttaattaaagctgaaaagaagacaacaattgaaacttgaattaatcttgatgattcttgattactttctgcacatttattgaaaatttcaaaaactggaggaacaatcttagggaataaacctatcattttaacaccaacaataacaacaatacttgtaatacaattgattgaagaaatagttaattctggagattcaccattagttaaaccacaatcaccaatgataacacttaaaaatttgattaatttagctggttcaatattttctgcaaatctgtggaatagtgttgccatagtatctaaacaagcttgtgataattcaacatcaacctttgattggattttttctaataaagttggcatcaataacgaaatactttcaaatgcatatggattttcagtatgttcaagagaaaatttagaagcagtaagtgaaataaggtttttcatagtctttaatgaagtatcggatgatttcaaaatttcattaacagatttggaatagtattcaattggtaataaacttaaaacatcacctaataatctgtaaaacttattgatgatttcagcatcttcggaattggagtttgaaatatcaataacttccaataagtatttaacaatttcagagaaactagctaatagatcttcagtatttctatcttgtaaaatttgagatgcaattttcaatcttaatttaggaatagagttagtactctttgaatctgtgagtgcatgtctaataaatgaaattaaaccctttcttaaattatatagagcacctttattcattgaaactatacttggaccaaaaataactctagatgataaatctttgtatacttgggaatctttttcaactggcttatcaggaatacatttccataaatctaaaaatttctttgcagcatctaattcttcctttgcagagaaaacttgtaagaacatagtagcaaaatcaaccaaagctgaacaatcacccatcttatgcttcatataagcattgacatattgttgaccacataagaataaaattaagtgaatagaaagttcactacctaaagttttagctaacgaagtaaataaacgaacacgtctatgtcttggaacatgaataaatgcactaacaaatgaagcaagtaaaaattcaatttcatcaattttaccatattgagcagcattagctaatgctggaacaacacaagtaattgtttgttcaacaacatgaccagaaaattcatcatcttgacgaatagtatgagcacccataaatgtgaaaattggcataacagaatgtaaaactaattcaggtgataatgaagcaagagcagcaataactaataataatttattttgaacttgtggagaatctgaagctctaatagcagaaacaataacatcagcacgaataatagatggatcctttaatggtgtattagaatcctttaatttttcaataatattctttaaacatgatgcaatagtttcttgtgcatataaaattggtaatttaccatctttacccaaagtttctaaatcatcaagaataatgaaaataatctttaataattcaaaggaaggttcaaaatctggttttctactaaaaaaatcagtaacttcaattaacatagtaaccttctttaaatgtgatgatgcgatatcagagatctcatcatccttcatagcttgtctagttgtttgagatgatcttcttcttctctttggaaggttagatgggtttggttgtgttgtagtatttaatgtacaattcttgagtaattcaatgaaaattgcatcagtcatattgattgattctaaaacttcaactggatcataattgacaaaattatcagataaatattcttcaagaataaaattaattattttagtttgatgatcaaattttaaagttgagataatttcaataatacgatttttagctaataatgataaactctcatatggggaaactaaagcagcttctaaaaatgcaatagcagaatcattcttttccttagctgaaactaatgaaataacggttgattcaaaagctgataaatcacaaccagtttgagtacatttggttgcccattgtggtctttcttggatataagaactaataaattcctcaaataaaattgaaggagcagctgcacctttaacatgatttgcattgtatattgaaattttcacaagatccattttaatacttggaatattaacatataaagcatgtgaggcaaaaaatgcaaggtataatttacctaattttttatttgaaagtaatgattctaaacaattgaaaagtgcagtattatcaactaagaaattagaagccatgttatttaaagtttctaaaagtgaaactgtatcctttggagaaataagagcaatcttgtcagaattatttccataaataacatcagataataaaattgatttaggggatgtattatcttttgaaactgaatataaaacttcgattaattcatttgcctttcttctaatactttggttatcatcaattaacaaggtaataacaattggtacaacagaaccaacaaatacctcagagtttaattctttaaaagcattaattaagttgctgatggataaaaatctagatttaacaggtgcatctgatgttgctattcttaataaaaatgaaatcctaacatcgatattctttaaacaagttgaaaggaaaacatcagttgatttatttataatactcttgagatataaaccttgaagtgaaaggaaagtttctgttgtttctgtttcatctgagaggaatgatgcaacagtgatattttcattttgcttatatgattcggataattcctcatccaatttagtaagatcaacttcttcatcaatagcaacaatttcatcatcatcatttccatcatctaaaatagtatcatcaataagtttactttgtgcaataacttcaaggtcagaaagggtagtatttaatgactctaaagtagataaaaataattctttattagtttcaattgcaaatttcaacaattgaacatatgaagccttagattctttaatgattgcttttaccaaatcagataataacaaaacaatttgggtttcagtgaagtttactttgtttttcttaattgaatcaacaactgaactatcaatatcaatatcatatgcaattaaacttcttaaataaacagttgtaaattttccaatgttattagatgaggataaaacttttgagtatggaactgaatcattgtaaatatttgaaggtaaactatttaagatttgtttagttaaaggttccaaacctttatcttgaactgattgaataagtttgacagtacaactgaaagcactaactaatgtttgctccgatgcagatgataaaatagtttgaattgaagcaaaaacaattgatctattaagtggaacagcagctgaaataacaatcaagatagtgtaagcactgagtttacaatcatcatttgcagagaccaataaagtactaacagcttctaaagcatgtggaacaatattttttaatttttcagaagttgttgaagataatgcagctaatgatgctattgtcattgaagtgtaaaacattaaacatttattgaagattgttttattacgaacttcactttgaataaattgggaatatagattgtaaaattcaacttcagtgaaaactttaataattgaattctttgatggattcttattggattttttgaaattaacagcccaagagaataattttggtaaatctgaaataacgtacattatacgtaagaaaacttgttgatcaaaataagggagtgttgataagattaaatattctgcattatagatattcatttggaatcttctcaatggccattctgccgctctaacagaaatagctaaatgccaataaggagctaataaggataagaattgattgattgatttatctaaattatcattttcttctttactttgaacttgtctatcgatttggatggatgtaagactaaagattgtatgtttaaatttagaaaaacgtttatctaattgttgaagacgttcaaatgcctccaatgaatcataataaattgattcaaaatcttcagttgcagcaaatattggatcatgtaagaaagaaattgaatgaattttggatcttttctttctatccaaagtaacctgctttagtacgttcagcaataccagccaactggtctgcaagagaggtcatatttgtgagcaattagggttgttctattaaagagtttgaaaaggatatttaataaaggtttaaaaatattttttttaagatgaaataaaatgaaaatttttttaaagattgaaaaattcggaaaaagtttgaaatttccgaaatatttgaaatttgcgaggtcatcacgtataagtatgtccaatgattagtatagatagagatagcaatgaagaagtaggttgattatatagaagaagagaaagaagagctcattgaactcttttaaacataacgataccaatacatggttctaattcaggataattttcaggaattttagcagtaataataatatcaggcttcattacgactttgctttaagacatttgtaaattgtttaacaagttccaattgtctattaccagcaccatgatcttccatatcactaaaatctttccatggatctaatgcatcaatttcaggtataccagttttagccattttaactaaatcaattctgtattctccagtttctggtaatttatataaacttaatttatgcattcgacgatctctatcagtatctaatggactattactattaggatcaatatcttcatctaataggaaatctctcttagagttatagaaaatttctgcatctgttatctctaatgctgcaagattaaacattgtacctataccgaaaaatggtgtttctttgatatgtaataataaagttgcaaatcctgatggtgtattaccaacactgattgcacaattgttcatatatcggaatgttttctcagttaatggttcaggtatttctggtattggctggaacaatatttgtatcatttcctgctgctatactgcctaattcattttccatcatggaatatgaaaaatcatgtctgattgtttgagcttaaattcggtgggccgttcattatgcgtatgtgatatagtgtataatacttcacacggatacagttctaaagaagatggatctgtaaagactttaaaaagctttactttatgataccattttcttatggttgattacgtaattttttacattcatattcctctatttccatctaatattacaattataaagtaaagatcgatacaaagatttacaaccactaatcataaatttgtattggtggaattttatctgccttatagttccaatttagcccttcaacttcttttttaagccatgtagtagggaacaaaacaatattacccttaattaatttaagcaactttaaactactatcgtaatcataaacaccttgtttaccaacattattatttgcttgcccaccaattctttgatatctctcaagctcagccaatttagccgatctttccagtctacgacgacgttgttcaacatcatcaatactttcaccaccaatactttcacctaatgtttcattatcaatattatcaacatcaccacttgtattttcatcaactgtatgacttcttgatgatttttgatacaattcaaaagcttccttcattttttcaaattctttataatcagtccatgtttgtacactatcatcaggttgtacatggaaaatcatttgatataataatgtatttctaattgcttgtgttaaccacgtaccttcataaaatttgatatctaatggatcttcaaatccatatggatcaataaattcaaaatcaactggtggtaatatatttttatcaatatctgcaacattctcatcattaagttgaactaatggtatatccatattagctaattttctgtttttcctactattcgatgaaataggtgggaaaggtgaagaagaagatgattccattgatgatgtagctgaattttcatttatacgattggatgaatcttgttgatctggagaaactcctttgtttccagtcaccgttgaagctgatttatagttggtaggattagtatgatcaacagattttgaaccttccgcaacaacttcatcatctcttgaacttccggtacttttattataatcagatgtagttctagaagtattactagcagtaccaaaactttcacctttgccattatcaccctttctctctaacaacattttactgtataattttttaaggtaaaaaagtcttttaatcattgtccatctgtcaacattaataacattttgttcactaatattaactttagattcttcaactggcttttgagctaaaacttcaagaatatcctcataatcaggtaataagctggattttgtattaaaccagttcccttcattattggcatcatcaatatcagctttgatttggttgatcttctccagtaaaaatctattaatttgaactttggcttctttataagaatttgaattaaaaccatcatattcacctctgacttcgtttctgtgattttcatttttgatacgtgtatcagatgataagtttttagcactacgaataccaacattttcaacaccagcacgatgattgaatgaaaatgaaaactcaagatcatcaagtgatttagaattatcacttttattttgaatattggagaaattagatatcatagattgtgtgagtgtttccttaaattcatcgttttcacaaactttattaaactctactgtaccttcacttaagcctaataaatatcttgtacctaattcaaccatggcacttaaactttgagatccttcattggacttcaatactgatgcgttaagaccttccttagtatgacagaaattttcaatttctttgaatctacgttcaacaagatcaattaaatcaacatcaacacccaaatgttctcgcattaaacggactcttaaactatgagcaaatttaccaacgtgatatgtttgaccatccattttggattcaataaggtccttgtctctaacaattgcacaaacttcagaatctcttgaaccacgcattgatctttcattaatattagcactaccaataattgcaatacgatcatcaacaaccattgttttagcatgaatatataattgttctgtagttaataattgactaggaccaatcttaccccattttcttaaagaaaaaaatgtaatataatcttcaggtctaataccaacacgacgtaatcttgaaaaaattgaagtttcacccattgaaattgacatatattgacattgcataattaatctaacactaccaccttctttagtatcaacatctgcttcaaatcctggcattaatggaataacaataactgctttccaaatttcaccgtttttatgtgctgttataattctatcaactaatgcatcaccaatcttatttttgacaaatgtattatcaattttacaacttgtaactaaaaaattgattttccatataaacgaaatgttcactttgttcaatacacttaatatatgcattttgaatactctgttcatgttcctttaaccctaacgaccattctccacttgatcttaataattgaacttcacaattaccctttaattctaattgttccaactctttatcagtaaacggtctaggtggaactaataacggtgtaggacgagaaggtctcttttgtcttaataaataattccatctttgaatgaaatgtcttgccaaatcccttgcaacttgaccagaagttaacatatgaacatcatgccatggcatacgtggaacactctctctgtcatacatatcatcatgaggtaaagctaattcaaagaaatctttcttacgaggattagaataatctttaccggggaaaatttgaaattcttgttgaaagtcatattgattagtggtagttggactatctttggtagttggagtatcaattttttctggaatttctggagagactggcgtagattctaaatggactggatttttcattttcctttatggtatttccagcattatatgaattattagtagatgagggtgaggcagaatctaacaatgtatcagaatttgaaacgtaatcagtgtttttagttttttcgaatgcatacttggaatcatcagctaaaacatgatcaggtgtatcatatctaccaaaacataaatcaatacctccaagaaatgcaagtacattatcaacaattaatagtttttcatgatgtgcccagaagaaaacgttttgaacaatttgatttggtgatctcaaaacaaaaatattttcatgtaaatctaataatgagtgcttagtatacattgagtctgtaacaacagtattcccaacatttctgtaaatgataataaagattttgacaccttgtctagcctttctttcaagcaatctatcaattctagtaatcttggttaccattggcaggtcttcttaaataaagttcgggagataaccaccaatcatgaatgtaaataacatctttaggccatttcgaattgcagatgatgcagcataccaataatctctaggcatcaacaaaccattgagcaaatgcattatttctaataggtgcaaatgattcaaatctatgaggtttagaccattcagttccattaataatttgtttaagtgccattgcccattgtaaagttaattttggattagttgttagtaaactgatggaacgctcagaatttttcaatttgattgttggatatgacttagaattttttaacatataatttggcatttctgagtcgaaatcaatattattaaaattttcatcataatcaggattttcattcatataatcattttcaccattgttttcattaaaattatgatcatcagttatctcatttatatcaaattttttcgaaaatccttggattgtcatttttattttggaatcaattaagaaaacttcttcaggtgttgtacttacaatatctgatgtataaaggaaaaatgaatcacccaaaacacaccatttttgagtatgacgtttaaccatttcactcaaatcatggaatttaaaatgactaactctccagccttgtttactagctgaagaaacaacaaacaaataaccttcttttctctttctataaatttcattagaaagtaaaatactaaatggagataactcaaaaaattgaagcataccattagattgctctttaaatgaaaattgtttaattaaatcattaaaatatgattgaatatcatctctatattttttattaagtttcattttttcatgaatgagttgtagttccttcttttgctttaatgtcttttttaaatcagattgatcatttttgtctttctttttgtctttactttgtttgaaatttataaaggcagctgatgacagcttagtcagtgtacgagtaactgaacgagctgagcggaatgaattgaccgaatcactgacgatggatgcatttgtgtcatctcttctaattgaaggtgtagcaattggttgtaaatcagcttcatattgattagtattactaatattattaacaagttcatgttgatttgattctgtatgattttcatcaattgtgttcaaattattatttttatctacttgattttcattatgattatcagaatttttcgtttctttatcatatttaaacaaatctttaatttttttatattggcttggcaaaactgggaatttaggtactgaaaaatcttttggatttattttatcttgtctttctcttgaacttaactttaataacaatttatggaaatgaatcaaatgttttgaatctttttccagatcccaacgcagaacatgatcaccagcaccatattctaaatgcagtctaaatattctgttcttggaaaaagctgcaagttttaataattcatcgttagtcagggcagataaattgtttctgcgttcattattttgggtatcattttggtttgagaacaatgcattaaatttattagtagcggtatttgtattattattgttgaatttaaatttcataaagtaaacttcctctgttatatctgaaaaatagacacttaataaaggtaacattataggtccctttttaataccatttttatctttaatgaatgaggatgttaaacataacatatcagcataacctaacagaaatgtatcaatcaggaaagcagttttttgatcatttttttcatctaaatatttctgaggatcattattcatgaaacttattgcattagttaaatgatttaaatcttccagttttatatttgtaagattagcaaaattttgatttaatgaaatattatcatttgaagttaaatttaaagtacgtaagtttaaattttcataataatgttcaagaggagaatgtttccaagttgaatttctattcggaagagttattggttcattttcatattttaaataatcaattgcgatattttcatttatcttattttccgtatcaacaatatcttcacgaaattctgaacgtatagattcaactaaatcatgaacaagatgattatccattgaagttctacttggattattaacatttaagttttcaactttatccaattgtttaatcagtttattaattgatttcatttgatcataatcaacagattctttagtacccgaatcttcaaattgatttttatttgttataactaaatttttcaaatttgatgaaattaatttaaccgtatcattaattgaaattgagccatccatataagaaaatgcagcttgtaaaggatttaaattaggtttattatttataacttcactatttttcaatcgttgtgcaattacatattctcttaattcagcatcagattttgcactatcattttgaattttatttaactgtgtatttagtacttgcaataggatcattaattttactagaatttacatcagaatttgtttgaacatttgatttctcatagggataggaatttaaatttacattagaatttgaagataattgtctttcttgagcatcataataatttgaagttgaagaaacagtcgaattgactgaacttctagactgtcctcttgttaaatgccctccattagaagacattcttaattgataattgaaaagaccagtatcaaagaataaaggaatattaataaagcttgttgaaatttgaattgtaaacaataagaaaaagttaaaaagggcacttttcaattttattctttatttattttatttctttatttatttattatttcttatctcttcagtttatcaagttttcactgtacattatttaattgaagtttgttaattatatacgtaaatacatcatgtttggtagtcatgttggtacagtaatagtaatagtaatgtattaaatcttcaaagtaattgtgatatcatgcagtattatttagttttgattacgtaagtatatttatatctatacgagcgacttatataggccataagtttatgctaagtaatcatccacacggtaagatactacttagttacataaaaaaaaccatgcatgttaataatacatttaagacataaatgcttgatgatttatattaaatatttaaaaaaatggaacttaatttttttctattagaaatgaatttttataaacaagaatataggtagtaaacagtataatatagtatgataataattttataacaatatatgatttaaaatttggtttctaaaacttttttgatttcatcaacataattaccctttatatgaatactattactattaataaaacaagtaaattttgatttttcaatttgaggtaaagcattttgaaggtcatttcttaattgaacaacattacccttaactcttttaatatcagtatattcacattgtgaacgtatagttttataaacaggtaaattacctgaacttgtacgtgaaatattataagttggtaatgcaggttttgtagttagttgagataatgagatttcatttaatgatggaagtactttagcaagacgtgcagcagatgatgcagataaagcagacattgttgtatatgtgattaaggagtaactcaatataaatgatcaactcttcctttaatggaattccaggtaagaaattcatgttgaaggtggaaactatagaaaaaaatttgaaaatctgaaaatattagaaaaaggatagacgcgacggacgcgactagcgaacagaccatattttcattattagatttacacaactggtgataggaggaattacaataggttatttacatgtaaataaattcttcttttaaggttcgttcaacaaataccatttatatataatgggtagaccaagactaatattactgttacgacatggagaatcggaaagtaattgtgataaaaatgttaatagatatacagcaaatcataaagttcgattaacaactaaaggaatggaacaagctgaaagagcaggaaatgaattaagtgaaatgatttcatcaaatgagaatattgcattttatacatcaccatatttacgtacaagggagacaacagcaggagttttacgagggttaaaaaatactgggtggaatggtaatgttaatataattgaggaaccaagattaagggagcaagattttggtaatttccaaggtagtgaacaagagaggaaacaattatggacagagagggccaaagtatggacattttttttatagattaccacagggagagagtgcagcagatgtttatgatcgttgttcatcatttaatgaaactttatggagaagaattaattcagataattgtccaccaattgttatattagttacacatggattagctgcaagagtttggttacagagatggtttagatggagtgttgaattatttgaagatttacaaaatgttaataattgtcaatggattgtacttagaaagggaaatagtgggaattcaggtgaaggttatatattagagacaccattacgacgattctcaggaggatatcttctaggtagagatggtgaagacatgaaagagttctcctatgaagatataccaacctctcgtagtaccagtcctttgttataataataagaagttaagtatattatatagattacgtaatacaatatacaatacccggagttttcgttcccgggaatgagtgatcactataatggtaaaaattatcttatgacatgttattattgttattatcaacagattggataataatgttatttaatgaacgcttttcttctggtttattttatggctttaaatatggtggtgttttccttttctctttcactttcattttgaaatttatagtctctttggattattatttaacaaacaaagacttaataataagttaaacaaataaatcaaacaataacaatggcaagaactttctttgttggtggtaactttaaaatgaatggatcaaaggattcaattaaaacaattgtcgataatttaaatgatgcaaaattaccagataatgttgaagttgttctctgtccacctgctgcttatcttaatttaacagctgaattaaataaacaacctaatgtctctgttggtgcacaaaattgttatttaaaagaatcaggtgcttacactggtgaaatttcacctcttgcaattaaagattgtggtgctgaatgggttattcttggtcactctgaacgtagaactattttcaatgaatctgatgaatttattgctgaaaagactaaatttgcagtagataatggtgttaaagttattctttgtattggtgaatcaattgatgaaaagaaagcaggtaaaactttagaaatttgtaaacgtgaattatcagcagttattaaaactgttacaaaggatgattggaataaaatcgttattgcttatgaaccaatttgggcaattggtactggtcttgctgcaacttctcaagatgctcaagatattcatcatgaaattcgagattatttacgttctgaaattggtgaaattgcagattctattagaatcttatatggtggttcagcaaatggtaaaaatgcaccagattttaaggataaacttgatgttgatggtttcttagttggtggtgcttcacttaaaccagaatttgttaatattattacctctagacaatagataggtaataaaagcatagcataaaatacatataatattttattttatttacttactaatatataatgataactgttttataatccatcctatatctttattaacgaatatatccaatacatcatcaacattttcattctcatcaacattatcattatttttaccatcccttaatattctacgattaattttaattgctcgtcgttcacatttacttatactaccacttacaccaattgaatcccaaattacatttttaccatcaacacttgaaacaaaaaacatcgcaccaagtactttttcaactgcatcacaatgaactcttaaaattccaactgatgtactattagaaaaatatttaatagtaaatgcatttaatgtctctgataatccaatatcaccaaaattttttgacattgatgctcttaatattgatattagggtctttggttgaacatttttagcagttttcgtatcctcaaaatccggatatcgtagttgaaataatatatatcttgtcttaagtctaaccattgtatattatcgttattaaacactatttgatataaaaacaacctctaaaaaagagataaaaaccccatggaaagtaattttttcaaaaaatcagaaaaaaatacccagccgcccatttagtcgcgtctttgaaaaaaatttattttttagactttcattatcatgaaatttgaacatgaacaatttcaatgtgccaataatattcggttatttgcttctttccttttaaacagtggatgttaattaagagaattagaataacacatcgtcttttctctacaacaatgtctcattacactaatcctgcaactaatccaaaagttcaagaatggcctgcttataaagtcagagaaactttccttaattattttaaagaaaagaatcataactttgttgcatcatcctcagttatccctcatgatgatccaactttattatttgctaatgctggtatgaatcaatataaaccaatctttttaggtacagttgatccttcatctcctttatccggtttaaagagagctgttaattcacaaaaatgtattcagagctggtggtaaacataatgatttagaagatgttggtagagattcttatcatcatactttcttcgaaatgttaggtaattggtcttttggtgattattttaaaaaagatgcaattatctattcttgggaattattaactaaagtttatggtatccctgctgatagattatatgttacatattttggtggtgatgaaaaattaggtttagaacctgatcttgaagcaaaagaattatggttagctgttggtgttcctgatgatcatatattacctggtaatgttaaagataatttctgggaaatgggtgatcaaggtccttgtggtccatgttctgaaattcattatgatagaattggtggtagaaatgctgcttctttagttaatgaagatgatcctgatgttttagaaatttggaataatgtctttatgcaatttaatagagaacaagatggttcattaaaacctttacctgctaaacatattgatactggtttaggttttgaaagattagtctcacttttacaagatgttagatctaactatgatactgatgttttcttacctttattcttaagaattcaagaaattacaggagtcagaccttatacctggtaaattcggtaaagatgatgttgatggtattgatactgcatatcgtgtcttagctgatcatgttcgtactttaacttttgcaattgctgatggtggtgttccaaataatgaaggtagaggttatgttttaagaagaattttaagaagaggtgctagatatgttagaaaatatatgaattatccaattggtaatttcttttcacaattagccccaactttaatcgaacaagttaagcatattttcccagaattaaataaagatccaagtttaatttttgaaatcttagatgaagaagaagcttcattctcaagaaccttagatagaggtgaaaaattatttgaacaatatgctttaattgcttccaaaactccagaacaaaccttatcaggtaaagatgtttggagattatatgatacttatggtttcccagttgatttaactagattaatggcagaagaagcagatttaaagattgatgaagaaggttttgaaaaagcaagattagaatcaaaggaagcttcaaagggtacaaataataaatcaggtaaaactttacttaaattagacgttcacgctttagctaaattaaatgatgaaaatgttccaaaaactgatgattcatttaaatatgatacaaaggatattgatgcaaaaattttaaagatttacattgatggtgaatttgttgattcaattgattatgaatcttcaaagggtaaacaaatcggtattttattagataaatcaccattctatgcagaacaaggtggtcaagaatttgatactggtaaaattgttattgatggtaaatctgaattccaagttgaaaatgttcaagtttatgcaggttacgttttacataccggttttattgaagagggttcatttaaaactagtgatgccgttattgcaggttatgatgaattaagaagatggccattacgtaacaaccatacaggtactcatattcttaattttgcattacgtcaagttattggtgaaggtgttgatcaaaagggttcattagttgcaccagaaaaattaagatttgatttctcccataagaaagcagttgaattaaatgaaattgctaaagttgaagacattgttaataaaactattaaggataacttgaaagtttatgcaaaacctgttggtttagaaactgctaaaggtattaatggtttgcgtgcagtttttggtgaaacttatccagatcctgtacgtgttgtttctgttggtatacccgttgaagatttattagctgatccaacaaatgaaaaaatggaccaattattcaattgaattctgtggtggtactcatgttgctaagactgatgatattaaagaatttgtcattattgaagaatcaggtattgctaagggtattcgtcgtattgttgcagtttcgggttctgaagcaagagaagttcaaagaaaagcatctgaattctcaaaattattagatgaagcagataaattaccatatggtgaattaaaggaacgtaaggttaaagatcttggtactgaattaggtaaactttcaattagtgttgttgaaaaggcagaattaaagaataaattttctaaaatcgaaaaaagtgttaaagatgaaactaaacttcgtgttaaacaagatactactagagttatggatgctgtcaaaggtttctttgcagaacctgaacattccaaagtttgttccttatatgttaaggcaaatgctaatgcaaagattgttgctgaagcaattaattatatgaagaaggaacaaaaagattcatgtctgtatttagttattggtgaatctgaaggtaaggcggcacaaggtgtctacttaaacgaaaaggctcaagaacaaattcctgctgttgatgttgcaactaaggctgctgaattcatcggtggtagagcaggtggtaagggtaactcttgtcaaggtatgggtgataaagttgaaggtgcaaatactgcagttgaagaaatcaaatctttattagaaaaattaactgtttagtgtagtatttttttgatatacggtcttattattatatactttttatttactattactattactatttaactttataaacttgtcaaatattctaattcttttagcattaataaagagggttaagaaaaggttcaaattgatcaacatgcggaacgaaaatttcacttaaaattatttattatcgtcatttgtaaatttttaagccatgatctgcttctttcctttaactaagcatctttctttatatataatacacacagccaaatactattcatttaattatgaaaagaagccgaaacagtttaatgctacttttacaacttatccttgcctgtaccaatagttttggcaataaatgtccttaatgcatcagattacacgaacaccatagaacaattaaatttatattctccagaggtcaaatacatcagtaaatctgaatccagcctagatctagacacattgggagtaattcaagaatcaatacccattcaaatacctgttcattacaatgatgttcttgcatacaaatttaaacctaatttatcaccggaattaactcactcttatcagttgttggtatatttgtcagcttcattatgtagtgttcctgacagttggaatacttctgatccttttaatggaatgaatcttttttatacattcaatgaaacagttgcaaaatctttattatatgatgacatgacgctcattacgtttcagaacggatttgctgagggtctagcacaatcttacttgcaaaatgatagaactgattatacactatatattataatagaaccaagtgaatgtgataattgtgactcgaatgatgtttggaatttagaatttgctgcctctcaaacgcaatcattatttgtctatgatacagaacctagaattagtgttattgatgttgactataattccattttatttgaagctgatcataaaatttttgcatcgaacagatcatattctcttcagatctttgaaggtgaatatccaatacctattggtttgaaccaatctctatgttttattaaggctaaccctaatgccaaatatagtttgagattggatcaatctaattcaactagtttttccaatgttttcgtcatttctgacctaacaattgcctgaacagtattcagctgttttggttgtcgattttacagatatcgtctatggtggtggtgtctttcaacctttcagttttacgatgtcaaaatcaaaatcatgtaaattagtttatggattgagtttctgtaacgaggtggcatattcagtcccaatttcttcaaacctattgtatgataaggaaacttggggtgattttgtttctcaatatgataattattcagaaagttattatcaaccattccaatatgccatgcaacaaattgcatgtgatacagaattagacgcacgttactctccaataagaacatgtgatgattgtatgtactcatataagcaatggttatgcgccgttactataccaagatgtgtttcctctttgaatgctggtccgtttaacaaagtttataaagctggtacaggtagaaataaatttattgaagacacaatcaaccctccattaccatatgcagaagttcttccatgttataatgtctgtgaggcgattgtacgtgattgcccagctgattttagttttgggtgtccagaagatccagaattggctaaactaagttatagtgatccatcatataatattttagaaactgatgaaatagacatgatcacagaacttgaagaggatggtgatatttatagattgtgtaattacatgggggagaataatatgggattaccggtttgagtataaacctaagagttccttttttatacaagacatatttaactgattagaaataaaacaaatttaagctttttgcttcttttgaggaggttgttcttcatcattaactgtttccttttcttcttctgtgttttctttagtttcttcctcctcttttttttctttatgattcaaagcaatagacttttccatttcttttctaacatcaatattaccacccttagattccaaaactttgaagagaactggagcccaaacttcttcgccgtaattggtgaaatcttccatttcaaagacatttttattgagttcccactctgcttgctttgatctgatcaatttaaccatataagaacttgaaccaacacaacgaccaatatcacttaataatgatttaatgtaagtaccagatgagacagtagatgtgaaatgtaaaagaggtgctctataactttcatcttcatatacatttttatcttctatgattttcattttcaatggtaattctttgttatctggattctttgccttccattctcttgaaaatggaacttcatgatcgttcaatgttggattgttagcaagttgttctgaaattgtcttaccagtttcgtcgacttcacttttgagaaatatgtaatcatgttcctttgataatgtatcatctttgatttctaaatcatgaatagtaacttctctacttttaatttgacgaggtaacggtaatccctctcttgcataatcatataatcttttaccatccatttttaaagcactgaaaattggaggtgtttgatctaatgttccaaccattctttctttacatttaccaagaagttcacgagtaacatgatctacttcagttttcagtaaaagttcaccttcactatcaccggttgtagttgaaccacctaataaaccaacacattcatatcttttaacagatccattagtataatcaccaagttttttggtacctgaaccaacaccaatgactaaaacaccagatgcaagcggatccaaagtaccaccgtgacccatcttaagtttatttgtcttccatttctttattctttgttttccaagagtttgatttctgacattttgaagttttttcaaagattcttgtgaagttgaagattttgaaagaactctgttaatttgatctagaacagtacgagaagttgcacctgaaggcttatttattgcaaagacaccatccattgttttctttatggacatccaagctctttaagtggtatcaagctaatttacagattaacatacaagtaattaataacataataaaatatttttgtatggtacacaagcacaaaaaaatttgatcgcagatgttgatgattacgtaacatgtttacaattccctgaatggaattaatctcttggggcctccctggttaatgtggttgatctagtatttcttcttgggattctttttgaattggtacaacaatcaattggggttttttgatcattgaatttaattgggtagcatctacttggaaatgtcccagaataatattggaactgaaatagccgatcaaattattgcagatttcactgctttagcaagtgaagctaaacgtaaaaatgcagaggtcaaacatgcatgtgatcattcaattgaattaacactacctttttcaacaagttcatctagaccccttaatgaatcagaaaaacaattaggtttccaaaaaacagctagaaaacatcctgaatatattactccaattataatggcttgtaactctaaaaattcaaaattgataggtctggcaatcaaacttctatctaagtttattcaactgcaaatattacctgattgtgattctgtatctgatgaatcttcagatccttttggctcaattgtggatgctcttttgaatgcctctaacagcacgcccgaagttcaaatcaaattattacaacttcttccaatactcatgcaaatgtacgcatttaaaatcaatgatgagatattatgcaatacattatatatttgttcaaacttacaatctgtcaatcgtacacctattataataaacactgcacaggcaactttttcacagatgcttaatatcgtgtttgaaaaattggattcagaagaagggagagatattgccaacgatttaaaatatgaagttacattggatgataagaagacaaccaaaataaaccaattttgttttgacgctcaaagaatagtttcagatttgtgtaccttaattgaacatcataaaccatcttttcttaaaacaaactatatttcagaggattatggatttgaaatactagaaggtatacttaaaaataactcagatgcttttatcaatcatgaagaattaacgtatttgttgagaaccaggatcattccaattttattaagattcctatcttctagtaaagattttacattgatggtaaaagtatcaagaattatactcctagtacttgagaagcaatttgaagttttaaaattgaatccgaagttacacttaatatgttgactcatattttaagtaaagattcaggtgccttgatgtggaagaaaatcatcatattagaattgtttgtttcattatttaaaaattcagaactcataaccaaaatgtttgacgagtatgacgataataaagaaggtgaaaagaagggagtaatatcaaactttctacgtgtatgtttaaccaccgtgaacgaaaataaacatgtgttaaacatgggtgatttgatccaaccgcctctatctgatcaagatttaaattcaccaaataattcccaacgaaagtcagtacctaagattggccttgattcaaaggattataggaaagttgtgaaatatattgattcaatggataaacaggagccaccgatactaccagatcactataacttatatttaatacttcaaattctgataggactttcagattgtatccaatcttcaacattatcgctaatgaaagctacagatcctgtattatgtatttctgaaaagtactttaaggacaatgaagaacctgaacttcaacactcatatcactcagtttacaatttgattcaaagcacctctaacttccagttagatattatagatatattcatccattcaactgttgataacgaactcttttctagctctctcaaactgctagaaaatttatgttattgctccggtatgttgacaaatcagaaagttaaacatagggttttagattatcttggtaaatgtactttaaaacttgatggtacacttggttataaaagtaaagttatgtcaattagtgaaacaattgttggtacaatcagttctacttttggtaatgccgtatcaaatatatcaaatcaaaataatgtaactcattcagtaagtcctccaaagttttatcctagaactatcaatactagacaaacattatgtttccatactttaattcggttagcagtatctttaggagcacaattgaatgatgattggaatataattttatgtgtcctgcaatgggttagttactatatagatgggccaactggatataacaaaaaggatattcctcctatctcacagtatctgaacaatagagatctgcaaataattagtcattctttatctgaattcaataaaagcatatttaatcacgatgaagttacatatggtatactgatcaaaactggtattgatatatctgaaaagctgatgtcaactgtcaatgatgaaaaactcggtcaaacacctataggagaaaatgatgaaattcaaccttgtatattcaacaaattattttatgttaacaaaattactgatttaagtacactcaatccaatcaactgtttgattttaccacaaaataattttgatatattgaatcaatactattccgacatttcggacaacagaaattattctgaggatgttagattacttgggagtagatcattcaatcaaatagtgaaagtttgtgccgatcaagggtttgaaagtgaagattcagaaatacatttcaaaacagaaactaaagttttaacaaatatgtgtagatttttggagaaaatttcagcactaccaatgtcaaatgagttactagtggcaaataacgaatcagaaatttatttacagactttagataccttgaagtacataattgatagatatggtagtttaataactgattcttgggttatagtcactcaaatgcttaattttcctttcttaattattaaaaactgtgattcagaactacaaaaggaaaaaattataaatgataacataacatccttagttaaatcatcctttgaaactttgaaagttattttagatgaaatgttgcaatctattccaaaaaatcaagttaaggttatcattgatagtttgtacaattttgtgaatcaaacatttgatttgaatatttcatttaattcggtcagttatttttggattattagtgactatattaaagacaaacttgagtctttaaatctaacaacatctttaaataaatctgttcaatctgaagaagatttagttgagctaatcaatgattcatcaattgaagagaatcaatacttccagtatttgtggttatacttggtattcaaattagcaaatactacaggtgatacaagaatccaagtaagaaacggttccatcattacaatttttggtattattgaatcatttttatctgaaggacctctggtaaatttactatacacaaacgttttgaaaccaataattttgaacaaagatatttctgatgtgataagaaacttgaaaatctcagagcaaaaagagtggatggaaagttttattagtatagtaaatggaatgaataaattttattcaaggcaagcaagtgaaaagaacttcctctcagatgacaatttgagtttactcgaaggtattatcacatattttattggcttatcaaacttagattacaattggattgaattaaactaccagattttcaaagcatatcttgaaatacttcaaattttcaaaagtagaacagagataattccaaagcaatatttggaggttctatacttaccatggtcattaattaagatcaactacaattttaacaatggatcactgtatcaaacatcattatgcacttttgttagttgtttttctttatcacttcaacttttcaagccaattatgaatccgtcaaaatttgaaaaaatgttaatggtattgaattcatgtattaggtatccaattattgtagattcaagaaatgatgacaagaaatgtacaagtttacaaaaagccgtgttagataatttagcagagctagaattagatcaaaatgatccttctttcattacttatgaatcactgttaatccaacaacttaatattattgttggactaccatttcatacaagaagcttgattgttaataaactgggagataaaggtataaagattccaacatttgttgctgcaagttattatggtatgttaatattggaaacacatctcaagattatattcaatccgaaattttttaatgaacgtttactcttgaaaatcactaaagcattattagagcctacagaacttaaacccgatattattgtggcaagaccaagtgacttaccagagaagctaatagattctactcaggaacataacgaagatgcaaaatcatatcctttggatgttcagttttgatatggtagttgaaattgttgttcaagtattgaaacatgtaatgagtctttcagaatccgaatttaaatcaaaaatttacactgattcatttgatcaacttattcaattatttttaagtgtttttgattgttgttttgtccttaatagtttaggaaaagatgctgatgaatttaatctaaagaaatatgaaacaatgaaacctactctttttgaatttttgaataattattataaatctgagaaagcttatcaaatcaaaaaggaaagtattgaacatgttcatattatcattatggagatcgtcgtttttcttcaaacatgacccgatcatggaatctgttattccaaacagtgacataaattgtgaatcaattatcgaagtatttgatttattatgcgatgatgaaaattggaacatttatggtgttgtcgataatcttgttgttcaaaatagtttaagccattcaatggtcacattcaatgatttattaactctaagtaatacagaaaattaccctcatatttcaacaattgtaataaactactttatcacgagatgtgcctacggattaagaaaatatttcatggatactaagattttgagtggaatgccaatgtctaatattcaacaagttgaactaaaatacattattaagggtcttatttctttgttggaaaatcataggggtaatacgaaatctacaagctgaaattttgagtccattgtatcctttgataattaaaatattaccaactgttaaagaaaatgaaacattagcaaatattgacaaagtttgcatggaattgttcaaacaatcaaaggtataactttgaagtaaatttgactataactgacttttatataattattttacgttaagctagatctattttaaaaatgtaagaatatgctagaaatttattacatgatagataattcatgatatatagattttttactataaatgttgtgcatcaaaattgtgtgacatgtcaacgtattccatttcattatcataaacatgatcaccaggattataaacagatgcaaaattaggttgactcatcagcttttcttcattattctgatcttttctcatttgttcaaactcacgccatgtcatttgtttaatttgtgaaccatcgaattcaccatcagctatcgccatgtccacctttgtcaccaccttgtgtttttctagtatcaccccaactgaaatcgtcaaacttccaaaatgcataggttggcagaacaaaattccaaattggtaatgctaggagataaatcaacatccacaaaacatacatcaagttggaaacggtaattaaaatcaaaagacttggtaaaccaaaaacgacagcacaaaagaacgacgggtaataaggggaatgtgctggaaacgatagcagataaaataacgtaaagggtaaatgcaatagatgcaggtaaaatcagtgtaccaatcaattgaataacaatgatgaattgcattgagaagcagaaagtaccacataaatctttaaccaaagccaattccatcaaattatgaacagtagagttaatccaacgacgtctttgtgataataagactttaaaactatctgggacgacagtcttacaagcagctttaggaacaaacacttgtttacgtctcgggaaggcacgtaacattaaagatgttaaatatctatcttcacctaataataacaagttcttcttgtgtaaacttttcaacacattatctgaatatttttcaacaatatctgaattggctaaaattggcacccaaacgttattacttttaggtgccttaatacgatacatacagaaacatcccggtaaacatgtaacactgccaaacactgattcaaaggcctttgattgatgatgtgaaatgtaatattcgaaaacttgaatggctgtaacccatgattgagccttatttgatattttagtctcgccacataaacccataatctctggatctttgacaaactccgctaccatgtgggttaaggaatctggatagatcaaagtatctgcatcaaccatcaaaacagattcatacattgtagccattaaacctgtaatttgccaaattgccttcagcatttcatattgcaaaggagtcattctttcattgaaagtaacagcctgtaagaaagacattaaaataatctgagaatcacgtttacctctattacccggtttagcagatgataattcttcaggtgtaccacatttaacaataagtaaaactggagtcttttgttgtttttcaataggaactgtagaatcatcgtatttatagaaacctgaatatattttggccatattatgccttttagaaccatgagcgacagagacatatgaaaacgcttggacttcttcctttggaacaacaagatctgtcatcatgtctaaacaaatatcaggagtggatttttcattacctgcaccagtaatcataccatcacaaaccaccacgaccaatttatgggaatttggataatctgtagttgcaatagaatcaattgtagttctaataccatcagcatcttcggaataacaagtaaccaaacacatagtatgaattaatggatagccaaaaggttcccaattaactggaggttgggaaataacatccggggctataagagaaggatctaaagtttcaatttcaccttcttcaaatggatcatttggattagttttaaaaggattcaaagtcaaattacttgtacttccaattgataaacgagacatacttcttgatcttcttttgttttcaccagccatcatatatgcctcggtagtcattgtaatatattttggttgataattactggaactattaattaatgacttagaaggattgtcaccaatgaaattcgttaatatcaccaccccaagataatcttaaacctctcttagctttactagaggaatgataatcggctcttctttgaattggaacatcagaaattggcgcagaattatacggattatcaacccaatcatctatttgattatttctttgtttcatctctttaattgatgatgaagagacaccttgaaatggagaaacaaaccatttgaaataacatgcaaccaagaattgaactatgacaattgctaaaacaaatactaaggagacccataaaacaatagttgaagcaatacaaccaacagttgtagtatcaacaacaccaacttttgctatttctactaagcaatcaggcaggcttttctatcttctccctctgttaataataaagagatatcataacctctcaaacttttatcatttttaatatcatcgaataatttaggataatgataattcatctttatagatccaatctataaatcccatgtctataacattgccattatagacaacaaaatttcttgtagtattagtgatatcttcccatgaataataaatatcaccttgaaccttcagatcataaaaagcttttctagcggatgatgatgtatgacaagcataacctgaataatattgagaatcaaatgatggagtagttgaaccatctaaatccatgactgtacatggcatataccatgctaattcattaccaacatgggggattttacagtccggttttggtactataagatctttacaattaccattaacattttgaaacaagaaactaccatctttaccaccagcattcaccggaggatataaaacatttgcaccggcaataattcctggtgcggcagggtgtttagaacgactaaggtcataagctctaccattgaaaaccatataggagttattaatatctgctggtttcattttagcaagtaatttagtacaagtaactcttgtaaaaccaaaggttaaaaatccaacaatggaaccaattactaaaatgacactaatcataccaattttctctctccatgcatattgtctatctttagttttcataccaaacaaactcatcacagggccaggagcccaaaaggtcaatatataacaataaagtttccaataagggaaaccacctttatcttcttccaaactcattcttttagggggtatagcagtataaaaatcgtcatttgaagttgagttatgatctgtataatgatctttgcttgatccagtacttatgaagggttctttaagttcatcaactataggtttattaatatgttgatcactattatcaacatattcatcattcagatggaagatttcctttggtttattttgaaagtttctattaaataattcatcatcggaatcatgttctttaacattatttaagttaaaaggatcgggatttctaattatatctgtgttatctgaatcaattgaatgaaggcggttattataatttctattttcaaatggtggagcagacagattttgcattggaatatcattatattcattattaaaaccaaaatcattatgttgatcatcagtatatcggttatttgaattactcattaaagaacttattggcgcactatttgaatatttatttttattattgaaagaattagaatttggaatagattgaccatatcttgcactatttctatgtactgaactttggaaagaggttggtcttgcacgttctcttttcactaacgatctctttctacccagatttccagattctggatctagggcgtcatatgctgatgttgccgaagcactattttgacctgcaaagttctgatatgcatgtggcactgtataaataaaaaaggggtgtgttttctctatgttagtaactttgttatcaatgaatgaaagaaataattaaaagatacttacttttcagtatatattacaggagtatttggtctattggagctccaaagtggtgaaagaccctaacaaaacaaagcaaattctacccaattcaagatcaaatcaacataaaattaaaatcaaattaaagacttcatcgaaggaacgatttcaaaatttaatttttcgttgtgaaatttccttttttagatttttgccctctttggaataattgctctttaatcgacatcgccggcgcaagtctgacaatatcccgcctaacagatagaatttcatggggggatcccggctaaataaatttttgggcggcaccaaaagaaagtggaaaaatgaaaacttcgcgtcgccaaaaatgtgaaaattcagttttatcacggtttcagttaattaaaggaccccgtatatattataggagaagaggaagaattgtaataagaaagtacttctggtttgaagaatctttaataggacattgaacaatcatttatacagaagatgtctgatagaagaagtccaaggaaaagattacatcgtcacgatgaccattcagatgctgacaatagctctgatgaagaagttcaaagaaatactcaattaagcagtcctcaaagaggtcctaatttaggttatcgtcgtaatcctttaagctcatctcctccaccttcagatccagcattggatattgcatcatcaccaaatgctgaaccgtttgcaaatgattctgaggaagaagaaggaatgggaagtgtaaaggatgaaattgaagatgatttacgtgatttggatgatgaaatggaggaagcaactggtagagatcttattggtgatgatatgatggaagattatagagaacgtcctgaagatgatagatatgatgatataaatattgatgatgatgccgttgataatatggatattggacagagaagacaagttgatcaattcttagatagaagggatgattttaatagaacacaaaatttagatcttgatgatgcagatgatgatagaatggatgatagatcagaagatgaatttggtttaccaactcaaagaaccagaagaagatttgaagaagatataaatgacgaagaattaccttcaaatgaaattacttatgcacaattaattgatgttaaggcaccatctgttcttgaatggatttgtcaacctcaagttacaagaacaattgctagagaattcaaatcttttcttttagaatttgttgatgaaaatggtagatctgtttacggtcctaaaattagagaaatgggtgaagcaaacagtgaatctcttgaagtctcctttaataatttaatgtcatcaaaggcaattttggcagattttttgagacaatgtcctgaagaaatcatgaaaatctttgatgttgttgctatggaagctgttgaaatccattaccctgattatacacaaattcattctgaaattcatgttagaataactgatttccatgatttattaaatttaagagatttgagacaatctcatttaaacaaattaattaaaattagaggtgttgttacaagaagaactggtattttcccacaacttaaatatattaaatttgattgtcctcaatgtaaaacagttttaggtccattcttccaagattcaaatcaagaaattagtgttagatattgttcaaattgtgaatatagaggtaaaatgttaattaattcagaacaaacagtttatagaaattatcaaagaattacagttcaagaatctcctggttcaatgcctgctggtcgtttacctcgtcataaagaagctattttactttgggatttagttgatattgttaaacctggtgaagaaattgaattaattggtatctataaaaattcttatgatggggttttgaatgctaaaaatggattcccagtcttcgcaactgtcattgaagcaaatagtattagacgtcgtgaaggtggtggtggtaatgatgaaaatggtgatgattcatcatctccatataaaattaccttagaagaggaaaaaatctttagaagtatggcaaatcaacctgatatcattgataagataatctcatctatggctccatccatttatggtcataaatatattaaaactgctattgcatgcgctttatttggtggtgttccaaaagatgttaatggtaaacattcaattagaggtgatattaatgttttattattaggtgatccaggtactgcaaaatcacaaatcttaaaatatgttgaaaaaactgcttatcgtgctgtcttctcaacaggtcaaggtgcatccgcagttggtttaacagcatctgttcgtaaagatccagttactaaagagtggacattagaaggtggtgcattagttttagctgataagggtgtttgtatgattgatgaatttgataaaatgaatgatcaagatcgtacatccattcatgaagctatggaacaacaatcaatttctatttctaaggctggtattgttacaacattacaagcaagatgttcggttattgcagctgctaatccaattggtggtcgatataatagtacagttgatttacaaagaaatgttaatttaactgaaccaattctttcaagatttgatattatttgtgttgttagagatttatgtaatccggaaaatgatgaaagattagcaactttcgttgttgattctcatatgagatcatatcctgaaggtgatgatagtatctttgatagtgaaaatgaagatgaaaatatgtcagatgatgaaatgaatgaagaactaattcgaacaagaagaagaaagaaattagaaaaattaagaagggaaaaggaaagtgaaatttctccaattccacaagatattttaaccaaatatatttattttgcaagaagtcgaatacaaccaaaattaaatcaaatggatatggataaagtttcacgtgtttattcggatcttagaagagaatcaaatactacgggttctttcccaatcactgttagacatttggaatctattcttagaattgctgaagcatttgctaaaatgagattaagtccatatgtttcaagtattgatctagatcgtgcaattaaagttgttgttgatagtttcattggtgcacaaaaagtcagtattagaagacaattacaaagaagtttcatgaaatatactttaccacatagaagttcatcatctaacagaactagaattaatgcaactgctacttctactgcaaccgcaactcgtgcttgattttacattatatttctttacctttaattttttagttcttttttattacatacgtttcaaatcaatcatgtattgatttatgttcatttattcaattgtatactactataagctttatttacaagcatcaatttcataacctgccagtaatccttatatagcaacattactcctaacccaacaaacagtagtttgtaatcggcccctcaatgaaatttggaaatttgtttttccgtgccgtgatgatgatggcggcaacgaaaaaatcatgttgctgttaaacccacagaattatcgactaaattgatcttttcttatttccgtttctttactgaataggtggatatttagagaacaaacatggcatctttgaccaaagttcccaatccagtcaaacccaatgatatcttttattttattccaaatctaattggatactcaagagtgataacattaatcttatcattctttacaatgaaaaactatccaattataactatgggattcctatatagtgcatcatgtttattagatgcatttgatggatattatgctagaaaatataatcaatcaacccaatttggtgctgttttagatatggtaacagatagatgttcaacttgttcattgattgttttcctttcagtattatatccagattattttattgcatggcaagtattaatatcattagatcttgcatctcattatgttcatatgtattctcaaatagttagtggatcatcaagtcataagaaattaaaggaaggtaccaattggttattaaagttatattacgaaaatcgtacattcttattcttagtttgtgctcttaacgaattattctatattgcactttacttatatcattttgatatattttacttcccaggtacatcgattgatttagcattctggcttattattgtttgtactccagtttggttctttaaacaagtttgtaatgttattcaattggttaatgcatgtcaaattcttgcagagttagatgcaaagaaaatcaactctgaaagaaaggctaactaatttatattaatcaatattattattacatagaatatcaagtacatatacgatatttcaatgaagaatattcttgtattttatactacttgaaaaaataccttttgatttcaaaaaggaaatgatttgactattttgagctatctttgatttctaacttatttacacaccatgtatactccccatcattaaatgacctaatttttatctattgcacttacaacttgtatatgaacgatcttgtactcacatttagcaaaaaaataataggataaaaagctttcagtagttaaacaaagttttaaaaaaataaaggggtcaactgggaattgaacccagggcctcctgcacccaaagcaggaatcataccactagaccattaacccttttatgcaaatttaagacgcgcgcttttctctgattttatttttttgccacgtgacaatttacatttagttcagtatatgaagatatattgaattgatgaagcatgaacaatatatgcgtataagtaatcaatctgtataaaattgtatattttaatgaaattaatgtaaaaaaaaaaaaaaaaaaaaactgcaagaataataagtatttttttatcacagtacttgtcatttaaagtcaattaaagcatactttttttttgtcttttttttaggcttcaaaaaaacttaaaatatatataaaactatttagacatccaacctaccagtaataaataatttcttaaaaaatcatattttaggattctaagattgttaatctacattaattaacaagtagtatataattaaagaaggccactaatatcttgaccattaatatttatacaagaaaatacaactacaactgttaatcatacgaagagaatagagattacgtaactaagtttaattaaatcgcacgccaacttcaaaaatcatcaaatctacaaatcgttatttcatgatccagtattcatactattgaatgaacaattgagtagattgaagaacaaatggcgaagaagaataagaacaaggacactaaaactgtgaagaaagttgaaactaaggaaccagaaattattaaagatgaagaaccaattgtagaaactgaaaaagttgaacctgttactgaaattgagaaagatacagcaatcaaagaagatacaactactgaagtggaggagaaaccgcaagtcattgagaccgcaatacccgagatcaagcaagactgaggaggagattaaacgagaagagactgaaattgtacctgaggttaagaataaacgtttaacattacaggaaagacttgaattagctgcacaaaagaagagtaaggccaatgctgagaagaaagctaaaaaaataattaacaatgaaatagaaaatagtaagacaactgaagtggaaactaataaagataagaacgataaaatcgagttaaaagaattgaatctgaaagatattacttactgaagatttaaccaataaccaacccgatgttgttgaaaagattgaaaaatatgttagttctaaaattgatagtgttgaacagtcatataaggaaaagataagcaagttagaatctgaacttgtgaaaaagagtaaaacctctgttgatatcaaggacagtaatttaatagagaaactcaaatctaaggatgaacaaatacgtgagttattagatgaaggtaataagttatctagaaaagaagttcaattaaatcaatccattaaaaaattaaaaatccatgaaagtgatttagaatctgaactagaaactcttgaaaaggcgaacgaagaattaagtggtagagtagaatcactggaagggaaggtcgttgattatgataaaactactagacttttagctgaggagaaacttgcaaatgaaacattaaagaagaaatttgattctttaaaagttgctaaggatagtttactagatgaacttaaagagattaaattcagtaaattggatgttcaattagaagatgttaaaaaagagttggaagaaaagactaatgaatttgaaaagattcaagataatcatgagagattattagtctcatctaaagatactgaagatacattaacattcaagataaaggaattagagaagaaattgaaagaaaatgaagagttactctatgataggaaccaagaaattaaaagacttgaagaaaatgttgagaaattaagatttgataatgaaaatatcatacctaccactagtaataataacaataataatgaaatccttcaacaacaatatgaggaagctcaagaaaattggaaattaattgaaagttcatatttgaagaaaattaataattttgaaaatcaaattgaagaattacaaaatttaaatattggatattctaagaagataaagattctaaccaatgatttaaaacaaaaatcgattgattattcaagacttgaagaacaaaatcaattgtttgaaagtaattctggaacattagagaagaaaattgaaacacttaatcaaacaaataagacattaaataataatttagaaaaaattaaacttgaattcaataaagagaaagaaaattttgagaaacatattcaaaaattagagcaagaaaaagaatcaattgaatcaagattgaaactacgtaataatgaatttggacaattaaatccacctaatactaatagtttctatttacaagatttatcatcatcttcatcattaatgaaatcattaaatacacctaatttgaataatcgtgtcaataataataaaagatattcagtccaattaagcgatccaacacaactaaatagtagacaaaatgcaccactatcatcaagtaattctacattctcattttcaagattaaataatatgcaaccaatgacaccacaggatagaattttaagacatcaaaattctatcgtatcatttgatagttatgataatgataatgttagagaaaatgagaatgagaatgatacattaatggataatgaaggaccattaggtattaaaataaatcaatcatttgcatcatttacaacaaattcaccacaattgaatgatgaagatagtgaatttatgatgtcaaatgatgagattggattaggtatggatgcagagactgagaatggtatgaatacaccaattattgagaatggtaataataatgaaagttatattggtaagaatattcaaattatgaataaattagcatcacagatacgtatacttgaacttgaaattaatacattgagagaagatagtaaaagattagaagaagagaaagaatctgcaagtaaagaaattgttagattaatgaatgataatgaaaaagttgaaaagattagaggagaagttaaggaacgtgatgaaaagatagcaacattagaggaaagttatcataaagtattaataatattaggagaaaaggaggaaagattaggagaattagatgctgatgttgatgatttaaaagatttattaagacaacaagttcaacaaatggttgaaatgcaagaaaagattaataaattaagtaataattaggatgatttaatgagaaagaagaaatgaagtaagctttgttctatagattgagtgcatagtatagatatttatatgcatattgtattatatttaatatagaatatgattaaaagagatatattgtattgtattgtattggatatgtgatgtattgagatatatgatttaaaattttcttaattgttaccttgttcctttgctaatttagtatgggtatcaatatcactggattcccaaggataagcaatccatttatcaggtacatcttcacctgataaatacataccaccattcattaaagattcatcaatttcagctcttttttcctttaatttattattaacaacgaatattgaaaatttagtattacccatatctttacctaatttttcagcattttccttaacatccttatataattcagttaaagcataatgaagggtagttcttgtatcatcaacttcatcaacaattaaaatatttttaccaattaatgaatcaaaatgttgagctaaagcaccaaaatctaaccattgagtacgaataacttctttaccaattgaatcagaacctgttacctaaatcttcataaagtgataaaccaatagcttgaattggaatatttttttcaccttgatgtcttaaaaatgtacgaataattcttgatggaataaatccaccaccaccaatagcgactataacatcaggtttaccaacagttgataagatttgatcagctgccttttgacataatttatgaacacaatcgtaggagatatatattttgtcttgggacattgtttataatgttaaatagatgggttaaagatgaccaagagaatgaaagttcattagaagagtcagtattaataaaatagttaaagattcaaattgaaaaacttaaaattttttttctgcaaaaatatttcatttccgcggttggagaagtctgtttacgaggttagttagctatattacgtaattttattttatctattctattctatacactattcatcatcttcctgttcaagttcaagttctgcatctgcatctgcatctgcatctgcatctgcatctgcatctgcatctgcatctgcatctgcatctgcatctgcatcttcctcctcgtcatcactgtaatcaaatcctccctctccatcaaggacaacgcttgcaccttctaatgtagtattgttgaattctgtatcattttcagtaatatttccattaagttcactattattagaattattgttattattatttgacatcatctctctacggatggttaattgatcattaagtaatgttaatttacctgataatttaaccatattcactaaatgtttagtctctgaattaagaatgttttgtaatgattttaaatatggaattattgatttactttgttaataatattgaacctcttaatataagtataaattttaaccattgtttaatattatcaattaataacatattagaatgtaaattattactttgtctatgataattaataacaatttgacatgctttaataaataaattagttgtttgttcaatttcaagtaatgtaattaatgattgtataaatgtaacattgtttgataaaattctaataaaattatcagattccattgattctaatttattatcatcatttatataattttcaatttgtgattttaaatcatgaactgattcaaatggttcttgtgattcttcatcttccatattttgactaatatccttatctgctcctgcttcttcattatcttcctctatttcaccttcttcttgaactttaatttcttcatgatcattatcagttacatttattttaactaaattttctaaatttttaatattattaaattctaaatcagttatcttaatattaaaattatcataccaaattaatttgaatacattatcaattattgatgtatcttcattatttaaaactggggaattttgaaatgaaatcaatttaccaatttcactaccaccatttatttgtaatttagcaaatggtttattattaccaaaattaaataaatcaattgatccatcaattaatgatgctgatataattttataattttgtaaaatattataatcattgatgttactcaatgaattataagttattatcttatttgaatttgaatctaaatctttgtataaattaaatgaatatatggaattttgatatgagatatagatataaccatttgaaaatttgaaaattgaatctgagttgaatttaatattagataaatcaatagttttcaataatttataatccattattaagtaaatataattttgaatttttttcagatataagtaaaattgattgatcttcatcattataaataatatttgaaattgatgaatcttccttaaatggaattgaacgaataacgcttggtgatatagatgaataaagatctatagttgaagatgttgaattaaatgtaattatatcatgatctaaatttctatcagtatatataacttctaaagctgaaaattttgaatctgatgaaattttatttgtaaaatcattagaatttggtgaatatataataatttcctgtgaatgtaaccaaataaccaacatttccatcaatgaagaatcagtttcttcattatcattatcaatattatcatcattatcatcatcatcatcattagctgatcttttattacgattattaattggtgatttattttgagtccaatgaaatgaaagtggaggttcatcatttggataatcaatacgacgatttgatgggaaaagtgccaaatgggtattagcaggatggcaaaccaatactgcagcagaacctgcaggagatgtgacagtagacatgtgatatgagggatggtttccaagttaacttgtatcttctacagcagttaaaggtattccagtgattaaaagtgaaaaatttaaaattttttaaaatttttttattttcattatgtgtgattacgtaaattatcttaagatagtattagtattagtattagtattagtattagtatacagtagattagtggtatattagaatggtacaagtatatataggatgttattactctccaccatcttgtctgaattcactttccgctaatggccctactccaatattagctaacatttcctcagcaactgttgggttacccattctccctaatgtttgtaataattgagtctctcgacgattagatgcatcaatatctgcctgtaatgaaacaatatattcaactgctcttgtaagtatttgtcccttattaggtctaccatctctagtaccggtatttctatctaaatcttgaaacatttccggtggtataagtgacagtaattctcctatacgttcattaacaccatctccacgtctctgtgtttgagattgcgtttgtgactgtgtctgtgattgtgactgtgtgttattatccaccggggttgacattccaatatcttaagagaatataacacaaagaagatatacactaaagaaggttcaagaacaataaattgaatcaacgcgataggggaatcgttttcttaaaatggaggtttttgccattgaagagtttatacaactgcttaatactttccttcttttgacaaatagaaatggttgattactctaaatgggacgctcttgaattatctgatgactccgatgtggaagttcatccaaatgtcgataaaaattcatttgttagatggaaacaaagagatattcatgaaaagagagctcaaagagagaatgaaattaaaggtttaaaaattcaaaaagaaatgtacactgcattaaattcaagaatggatcaattagttaaagaaattagtgatgatgcaattgtcactgaagatggtagaaatgatttcatttcaaaaacttttaattccaaggaaaaatgtaccttagaggctgatgatcaagctccaacttataatgaaatgatggaagatttatttactcaaattgaatctgatttgaaaaaagatggtcaatcaatttctcctgcaaatattaaggcaaaacttgctgaacatagactgaaaactgaatccgtgttaaagcaaatcgatccaaaaattgaagaaattactttagaaaaaaataaacatattacaagtgatgatattcatgaaggttggaatagttcatttatcaacaaaaaacctactgaatctaaaccaactactgccactaacaaaactacaaccattgaaactcttaactcacctgcaaaatctaaacctgctacatcaatccacaacttcaactacaactataaaaccttcaaagccaatatcagaacttggagaattagaactattacctgaaacaattgaattttctaaaattaataatcttaaagaatcttgtaattttatcatttcacattcatttattgcatgtactcatcaaaaggatgctttattaatgaaatcttttgattatcaattagctgatgatactgaattagcagcttcaactatagagaaaggtatattattacaatttgcatcagatatattagaaaatgcacctgatccaaatatgccaatgacaatgcgtttagaatatattaaacgtcttttcggtcaattagagattgaaaattctcctagtagaaatgcatatgaacaagaatgtggaagaatgattgaacatgttaaaactcgttgtaaaataattaaagctgagcaagaaaaggaaggtgatgatggtgatgaagaaggtgatgatcatttagttgaacaaattcaacttagaagtatggatcctgatactaaattagttgttaatataccagagaaaggtactgatgaatataaaatttatgaagaattaccagatgcaatgaaagatgctttaaatactggtagtttagatgaagtcaataaagttttcgcaactatgcccgttgaagaagctgaattattacttgaaaaattcaatgaatcaggtgttattggtattcaagcattattggaaaatgaagaacaattcaaggaattaactgaaaatcaacaaaaattcgatcaaatgaaggaagctgcagaaaagatcaatcttaacgataaactaaatgagttagtataattgttatattatcatatcatatcatatcatatcatatcatatcatatcatatcatatcatatcatatcatatcatatcatatcatatcatatcattttaattttataaagtatcaattttatataaacaactatatacataatgtaaaataaagataaagattcattccacctgtctgtcgtgattatttatctaatgctggcattcttaagatttctctttcagagttcttagattcttcttgtaaaagttttaaaactttggaattttcccatttctctggtaatggtgtgattttataattctttgtagcccaataataaatatcccaatctaactcatctaataatttatcatattcaactaacatttccatatcaaaattatctaaatatttctttgcaaatcttgataataataagtcagtctctaaaatacctctctttctactttggtaaactaatcttttacgtaaatgttcaatagattcaccttcacgacttattggttgaactctaatgacaacatcattattttcatcaacataataatttttaactggttgaccttgaataaaaccttgtggggatgattttttattaattggaataggatctgcctttggagcttttatagccaaactaataatcgagctatgaaacccacgaacacctaatctacctctgaacatcattacctttgtgctaagatatattaaatgaagatcaagagaacaaacctctgattatcggaaaaaaaagtgcacatttccataaatttcaagtatcaaaattattaatcatcaatcaatttttcaacattattatgaatcattttgatttgcttttccgttttcggtgtcgaaatagttgatcaatataagatatatattaaatgtctgttaagaaacataagcttgacgatgatgttgcatcatctgcagaggatatagctgctaaacattcatattctataatcagtagaataacaaatgaaactaaaattcaaattgcattatcattaaagggtggtcatatttcaattccaaattcaattttaatgaaaacttatgaacctgcaactgacagtaaggcacaagttatttcaatccattcaggtgttggatttttagatcatatgttacatgcattagctaaacattcaggttggtcattaattgttgaatgtattggtgatttacatattgatgatcatcatacttgtgaagatattggtattgcattaggtgaagcatttcatgaatgtgttacaaagcaaaatttattacgtggtgttaaacgttttggttcaggttatgcaccattagatgaagcattatcccgtgcagttgttgatttaagtaatagaccttttgcagttgttaatttaggtttaaagagagaaaaaattggtgatatgtcatgtgaaatgatccctcatgtcattgaaagttttgcaacttctgcaagagttacgttacacgttgattgtattagaggtgaaaatgatcatcatcgtagtgaatccgcttttaaagctttagcagttgcaatgagagatgcttttactaaaactggtggtaatgaagttccttcaactaaaggtgttcttatgtaaataataatcatactatttaatatacattcatatatacatacacatgtacaattccatacattcttttgtcagtcttttaaaataaactttattgtttattttctaattcataacgtttctgtctccagacattgtataaacctaatgaaccactagttaaccccaagacaacatgtaatggtttatacatattccaatggaaaatatatttagcatcaaagatcatatcacatgttaaacgaattgcattaattttaacagtagtcttatctctcttgatctctgataattcatcataatacatttcatcataatacatttcttcctcaccaacaatttcagtatcttcattatcatatttatcaaaatcaggactttcattacgtttagtagtagtagttatctcatttgaattatttttcttgatatcacttactattcttcttgtacgtgccttaacttttttattcaatattattttagattctttatcctttaataaaatccatttattccaatcattatttaagccgagtaaaattgatcccatccatgaataaagttcatgatcttcagcaaattgaaataatgaattactgaaactatctttaccattactattaccatttaataaaaatttgaatctataaagtaacagaatttcatcagatattgcataccaaaaattaatcatttgtgatattaaatctttacttgtccaatatttaataacagtttccattttaactgcaggtccatctaatgatgttctatctaataatatcttcaaactccatttaatatgattactaaatttccaaattctaaatggtatcgtgccagcacgtaataaatgtctataaatattaagaccttgaagtaatgatgataatttatttgtaatatatgcaattataataacaaatccacgatgaatactcttttgtgacataatctttgcatatttagtcaatattttggaaaataatgttataattgttgaaattgaattaaatttagtttcattattatcgtttgagtcaacagattcaacaacttcaataagtttttgttcatttaacactgatcttacaatattcccattagtatccattcctaaatgtttggccacacgtggattaccaagtccatttacttcatgaattgcagcaatagttctaataccgtattgaatagttttagcaagtttatccttacctgtaaggtcattaacacaagcattaaacacttcaaatcctgatacttgtctcttagttggtcttttaccattgtttttagcaatttccccttcatatggagcaggtaccacctctttcaatcccataacgttgtttattttataaaaaaacaaacagtttaattaataaacagtcagaaacggaaaagaaattccacaattttaaaaatttaagctgacaattcatgactctttccgctgtggaatggtttttgatcggacatttctttaagcttcttttctttcttttagaaaattatacttaagtttagctctacaagtcaattgaatatgtcagatacatcattaatcacaaatacaacttgtttacacgtttccaatttagaaaaatcagttgaatggtacgtttctgccttcagcgttgttgttgttaaggaagtggaaactcccgcttacaaatcagctttcattgcattagatggtgaagataagggtaaacctgcatcagctagagatggtgtaattgaattaagatatcttaagaatgcacctgcaaatgcaaaaatttataatggtaatactgatccatatagaggtttcggtcatttatgtttctcagtttctaatattcaagaagctcaaaaacatttattatcacaaaatgttgaattcaagaagaaacttgaagatggtagacaaaaaagtattgcatttattcttgatcctgatcattattgggttgaattaattgaaaatgaaattaataaacaaccaaatgaatatgatttatcatcaaataagatgaatcatacaatggttcgtgttaaagatccagttaaatcattggaattttacaaaggtacattaggtatgaaattattttctaagagagatcatcctgatgctaaatttactttatatttccttggttatgaacataatgaaggttacgttgaaggtattgaggaacgtaccccacaagcttgcagacaatcaattattgaattaacacataattggggttcagagaatgatgattccgaatattacgttttcggtaaggatgaatccgttattggatttgatcatttctccgtttcatctaaagattctgcttcatttattaaaaaacttgaaagtcaaaatgttgaatttatttcaaatgatggtacttcagcaacaattgctgatccagatggatggaaagttgaaatccattcatatgattacttaaactagtatgtatagatatatcctggtattttttttacgtttttatttatataactatatgatatataaagacaaaacaaatgaacaaacttaatgaactattatactaacatgaaattttgatacattacttagtacaagcaaactgtaaaaaatatatcactatttactcttctttaaatttcaaactaattgaattaacacaatgtctttcatcagttggagttttaaaaccttcacctttgaaaacatgacctaaatgtccaccacatccactacacataatttcagttcgtatagttccaaaactattatcagtttcagttttaattgcacctggtaaaccttcataaaatgcaggccaaccacatcctgaatggaattttgtagtagatttatataatggttgtccacaacctgcacattcataaatacctaatttatcaaattcattatattcaccagtatttggtctctctgtagctttttctcttaatacagcaaattgagcaggtgaaagtactgccctccattcagattcagttttaactttattagacatactgtagaatcttaaacaagctcttcttgcaatgttcatcgtataaaatgtaaatgaaaaagttaatagaagagttagtgatttataatacctatgggaccggaaaaaggtactaaatcgctgattaaccttaaatcgcttatattatcctggattaaaatctagtttataaaaaaaaatattagctttgcaaaaagatatattaaagaatgaagcataaatacataaattaaacaaaaaaattataattagtaaacatatttaaagtgtttgttttgtttatcagataaatctaattgtaaattaccttcaataatttcaacttcttcaatttctttacctgataaactttcctttctcttattttcaaatctaacaactaaataatataatataccagtaaatgccataattgcaaatgatgcctccattgcatgaatacccattggataagttggagattgtgaatctttgaaaaaataaggaccaataatattaccaactgcataccaaacagcaactgaaattgacataaaagttttctttgtgacacctgaagtatttgatgatgttaatgctaacattaaacaccaaggaacattatagaatcccatcaggtaaacaccagctaatgctgcatgtctattttcatgtggattaattttattaaccataattgcacctgcaagtgcaggtaaacaacttaaaacccataataaacatctaatattttcaatccacatacataaagctgtaacaattataccaccacctaatgcaacagctgcttgaggtgatgccattaaagtagttttcaaagctgaaaatccaaaacctttaataattaatggattgaaattagttataccagcatttgtaattgattggcaaataatgaatgcaacaattatataatattttggatcttttaaactttcaaagatgtgatgaagattaatatttgcatgttcattcacattaacttttgtaccagtttgattaccaataattcttaaatacgcaatttgcctctctcttttagttaaaaaccaagctgtttcaatattatcaggtaaaatgaagaataataaaattgaataagcaactgtaacagcaccataaataatgaaaagatatttccaagttggtaatttaccattaattaaaccaatacagtgaccaaagataccacctagaataccagctaaagtgttaaaatataatactgtacgtaaaggttgttcagatttagtccaccaaattgaggcaataatcatgaaacaaggtaaaattgaagcttcaaagatccccaaaaagaatctaacagcaaccaatcctccgaaactattacatgctgccatacacatcaatataccaccccaaatacctaaacaaattgaaacaaatttaccaattttaactcttggaattaaaaagaaacaaataaattcccccaaaagataaccaaaataaaagacagatgcaacagtagagaactgacttccaactaaatgagtatcttgtttaatattataaacatttgcaatacctaaggcatttttatccaggaattctaagaatgcaattaagaataaatttgtacagataaataaatcaattttccataaaactttccttttaatagatggattttgttccatttctgataaaagttgatcctcttcatcctttgaactaaataagatagtatttgttgattgtgagtttactgatcctgtctgaacattactgtccctttcctcctttacagactcaaaactttccattacaccctcttgctttcactcgaactaagtttaaactaatactagtacgaagaaagagagaatcagcaatagttttatatacactgtcaccttctgatatacgagataagacgaataaacttttcccagggtcataatagccgctttagcaacttcaacaatacctcggggattccgaagattttcccgaatattttttttcagtgataagtgctttttttctattttattactgtaaagggaaggagcttgattcctatatatatgccacagttttatctcgtatttaaattcaatgtaatcgtatatttcatgtatttatgaaaattgtactgtcaatatacttctagaagtgttcttctatagacaactatgacttcaagtactgaacttaatggtgatcactcatttattgaggataaacgtaatgagaatattaagattggtataagggacggtgttagtttgaaatttgaacttttcccaagaaatgaagctaaagtatcagttttcgattcatctgtacttgttggtgacggtatatgggaaggattacgtgcaattgatggtaatattcaatacgtttatgaacattttgaaagattatttcaaactgcttatgcattatggattgatttaggtgtaactaaacaagaattattagaattaatttatcaaacaattgatgcaaatgaaggtatgaaagatagtaaagatgttcatattagattgatttgtacaagaggtttaaaatcaactccttatcaatcaaggaaagttaatattggtaaatcattaataattataattccagaatataagaaaattgatattaaatcatatgatgttggtattagattaatgacatcatgggttcgtagaggtaattcagatactaaggatgaaatgtggaatcatttatcaaaggcaactgatgttttagcaagtatgtcagctgagagtgcaggtgttgatggtgcattaatgttagataataatggatttgttaaaacttgtaatgcaactaattttttcattgtacgtaaaggtgaattatgggctccaactagagataatcaaatgcatggtattactagacaaaaagtacttgatttagcaagagatgcaggtattgttgttaaagaattaaattttacaatgactgaagtttatactgctgatgaagctttctgtacaggtacaatggcatcacaaatgtttgttaaacaagtcgatggtattcgtattggtaatggcactgttggtcctgttactaaacgtattagtcaattatacaaagaggatgcattgagagatgttcatacatcaagagaagatacacttaaaagattagaatcataaaggattcgaacacggggttttcaaactgacccgcctacttagattgtctatatttttttattatttcttaattaggtaataattccataacatgaaaatcaaattatttcgtgtttgtttttataaattcattaatcgatatattacacttcttttctttgaataatgagtaaaacaccacagggtacacctagtagaccacgccgtaggataagtggtaaaggagctgatgctaaatatttattttcatccccatatggaggtaaatcgccatttcccatgccgattttattacctgaacaatacaatgaagttacccaaatagataaacaaaatgagaaatcacatatagaaatatttcgataaatctgttgttaaagaactagagataccgccagttggaacagaaataactaatcaaccatttttcaatgatgaaatgagaattgattttttaaatggattgaaaaatttcgaaaagcaaatgaataaattaaatcaaatgaatagtacagttgttgaattaaatgaatcattaggtgcatatctttttggactttatcaaaatgcttggtgtgttaatttaacagatagtggagaatttattgaaaaaatggaaaaaattaaacaaattaataaattaaaggatgaagttgaaaatttgaaaaatcaaataaggttgaaaaaagaggaagaaaataatagaaggaaaagtactatgccacctccatctatccctagattatcaatgattaatcgtccatcattgactggacgagccggaaagagagtgtctgttcaaacgcatcccgtttctaaaccaggtcctaagaaatcatttctcaaagctggaagtcgaagtagggcatggaatactagtacaaataataatgccattacaaaacctggtagaaatggacttggattaagtattgattatgcaacgaagtttcaagtcgatgattcagtcgatagtatgagtgatacaagtgaagttcaaacattaaacactatacgacgtttacaagagagaagatctgaaaatgttttcacacgtgttagtgctagaagtcgtaataatagaacagaaagaaatagtgaatcatggcaagttaaacataataaaccatttaggtagaactgtatagtaataatttaattttttgatttaattcttaatttttaataatttatagatgatttcgactatgaaagacatatacaagtaaaggaatcaagtgtatacactatagaaggaaagaaaaagatgcaacaaaaacaataatcaattaaggttttggaatatgaacagattttgaaatcattaaacaaccttgtaaaacgtaaaaaaatgaaattggatgccattcataaggtgtaccttcccataataaaccaaatggtaaattatcaccaatcatatcttgactaattaaataagatagtacagaaactaaccaaagtgaagttggaattgggaaaccttcaaaatattttgatttacctgataaatcttttggtatattattaacagttacattgaatcttgctaatctacctaatccacataataccataaatactaaatttaaagtatctgcagtagtttgcataccagaacaaaatgcaattgcagatggtgaaacaccaaatgatattaaatcagctaatgaatctaattcttgaccaatcattgaagatttatttcttaatctagcaactttaccatcaaagaaatcaaagaataaaccaaggaatgtgaaaaaaatagcacgttgtaaataatgagtttgtgaagttaaagtaaatcttaaacaagaaattattgaataaaaacctgagaatccattaagcattgtaatacaatctgccatatgtaaatttctaataaatgataaatgtctatcatcagtagtgaaagctcttatttcatgttcatcaggaggaggtaaaggttcctcatgaagtgagaaaattgatgacattgatgatgatcttctctttaaaggttgaataccagatgttactgaagttgttaaattttcagattctgaatcagatataactgcactatcagcggatgctaatggaatttcattttcatctgataatttactcattcttgatggtctagatgtcatttaattgcaacaattggatgtaaattggaggaaagaggatatgttaaataaatacacattaaattaatttcacagccaaaaataacctttatccgtgttgttactataagtgatttgaaaattttattatacgcactgtaatagttacacagtgttttttgcatgtgcaactttatttgattattacgtaatattatacacattataactaacataactaacctcttacaactgcatcaatacatttagctacataggcaacattaccagggttaagacctgcaattgatgcacgtccactacccactaaatagacaccatgatctttttctaatgatgcaacttgttcaggtgtaagaccagtaaatgagaacataccttgttgttcagtaatatgattccaagtaccaggagtttcaagacgatttaattcattaactaattcttgtctcattttaccaatacgtgaagacatggtaattaaatcttgttcccattgtttataaagttctggagtatttaaaattttagaaacaattttagcaccataagcaggaggatttgaaatttctgatctaataattttagataattgagattgaattgcattttgtaaaatttcatcatttgaaggtaaaacaacatgaactgcaccaactctttcaccatacataccaacatttttagcaaatgattgacaaattaataaaccatggaaattgatattttgaacccatattattaacagcttgacgaactgcccaagcatcttttgcaagtgaacctgatgaaaaaccttgataagctgaatcaaataatggtaaatgacgttttttagaaagtgcatctaaaattttactccattgttcctcatttggatctaaacctgttggattatgagcagttgcatgtaataaaaagacaggaaccttcaggtgctgaatcaattgttgataataaacctgttaaatctaatgatttagttgaagtattccaataaggataagattcagtttttaaacctaaaacattgaaaatttggaaatgatttgcccaagttggatttgataaataaattgttggtaatgatgcattagctgattcattttcacttttatattgatttttaagaaataaacctgcaacatgtaaagcaccagtacctgataaactttgaattgagactaatttattttcagaaattgcctttgaatcatcacctaagataactcttgcagcagctgaagtaaatgaagggaaacctgaaattggtaaatattcatgattataatcagaagaattttgaagcatattttcagcaagacgaactgaaggtaaaatccaaggtttaccattatcatctctataagcaccgatacctaaatcgactttatttgatcttaaatcttttgcatatctagcctttaatccaaaaagtggatcagctggtaattgtttaatattagcacgaaagaaacctcttgacattgtgttggagtcgttagtagaaatcgagttagaattagaattagaagaagaagaagccattgaaatgtgatttataaatggccagaaattgatatatggagatagtagaccctttaaatagattgagttcgtatatcgaaaataataaagactccaaaatagaaatgactcttgattattattaaaccttttttccattatctccacattgagagtcatgccgaaaaaatagtttgaaattttaaattaatttttaatgaggtagtccaccaatggatgattcatttacgtaatttactaagataatacacttgggtactagtctcatcgaccgtggagtcatttacatttacagctatttttattttattttatttttaaaatacccgatatccgaaatgtaaacagtcaagaaattacgtaatacccgatttcaccctacttttctcaaaatgttttttttttttcactcaattaacactcaaaatggaaaatgtactattaatcagcatgaaatcagaatgcattaataatcttgatcttgatcttaagcttctattttgatcttgattcttgttaataacaaccagtttacccttcttggaaagtagatcagtaaaattatggatcttttacggtgatatagtggaacatccaaccgagaaaccaactttaaatgaatcagtaaggcctgcagttattgcatctgctaaaaaaccaagtagatggaaacaaagattacaacaaaaaggtataaattcaatgtctggtgttgttcaaaatgaaaaaagtaccccagaaaaaccaacttcattatttactaaagatgaagatactaatatgagaaaatttaatgatccaaaggataggaaattagattatactggattatctgaatctgaacaaattcatcaagaaaatatcgaaattttatcaagaatgtcaactgacgaaagggaggaagctaaacaagaattacttggattcattagatcctcaagtattacaaatgttaatgcgtcgttctgctaaaaaatatggtaacccaaatgataaatctggaaaaggcgatgatattaaatataatataaaggatgatcctctttatcaacctgttgaagggtcaatgggtacatgggttggtggtgaacatgaacttgatagagaggaacagataaaggaagtaccaattgaaaaaatgagagaaactgtacaaattagaaaacatgcaccacccacaattaaaacatctagtaccacgttctactacaatcaccacttaaatctgcattgaaaacatcagagagtattgatgaatcattaaatgaaacagtcgatgattcaaaatcctaaaaagatacgatttagtaaagaatctaaagttatttatcttgatcaatcagaaaaagttaaacaagatactccttcaccttcaaattctgatggtgaatgggaagatgttgaagatattaatgatcgtactccatctcctgaaatttcattacctaaaattgatgatgatgcggccccatctattgaagatgcaaagaaattatgtaatgatccaactcatgaccatgatcacgatcatgaacatacccattcaactattcatttccccaagccaactcaaccatatgaggaattagacattaatgatcctaaatttaatgataaattatacgagaaatattaccctgatttaccaaagaatcctcaacaattagaatggatgaaaccaacaactatcgatgatattcctaaagagattgaatatgattcaatagaatctgttagattcgattttaagggtaatatcattacaagtgataatattggtgattatttaaatgaaaatcaaggattatttaatcattcacaaaatcctgaattacctggttatacattacccgaattagcacattatttaagatcaacattcccaggtcaagtatgtatcgcttgtcgtacattaggtagaattatgtttaaattaggttcattagaatatcaaattaatgaacaaatagatgatgaatcaaatattaaaaaggaaggtactgaaggtaattttgaaattgaatgttggaaattaattgatcaactgaaaatcattcaattattagaagtctattccttccgataatcaaaaaaacctatcaattaaaaattatgcgatcgatgctctttggctatggaaaaaatgtaaaggtgatgaaaaaataaagaaatacagagaaaataatgaatctaaagaatagtttaataaattgtaatctataatctaaatagtatattttttttataaaaagctcactcagtgacatgtagcaatactaactttattaattgtggaatttaatctctcatctctaataactttataataatgatcagtaaaatcaactgcattcatacatcttaagaatttttcatcatgtgtaattataattaattggaaatttttttgagctgatctttcctttataattgaatgtaatgatttagctaaactttcaatattttcatcatctaaattagtcgttggttcatctaatgcaatcataccaaaatttaaacaaaaacattcagctaatgcaattctaattataattgatgctaaaactttttgtccagctgaacatctacctctcatatctaattcagtaccatttttaatcataacaacacgataattatatgatctattattacttgcaattgaatcagtttgcttcttcattgcaattggatcagatttaatttttatcgtttcaatatcattacccatatatgttttcttccataactcatcaataatattattaattttaagcatttgtgtttgatggaattccataaccccattatctgtcgccttatataaagtcgttaaatcagttgccaatgctaattttgtctgtaatttagaatattcattactatatttaacatcaatatctttataatctcttgaaacttcatctattaaatcaactctctgtttattcaattgtgtaagctcacctaacttcacagcataatttttctgatatgactgttgtgttttctgtaattcattaatcttaattaaatattcttcacgttgagctaatgctttcttcatatctaattctttgatttgttcctcaattgttattaaatctgcttcatactgtaataaattaagattggctctaatatttctttcttgattattagaatcagccgacattaattccaatcttctaagttcttcattatttttcacattttcttgaaccattctctcaatcgtacgtttcttgttctcaatactttgaataatttcattgatactaacttcagatacagttgcttcacttacttcaatttctttcatgatttttataaattcttgatgatatctttctaaaataatcagcttgtcatcgaatatctttatctcttgatctctatggttagtagctcccttgagttcattaattatactttgaatttgagaatcacattgaactatatttggttttgtatcatgaattctcgaattaagttcatcaatttcttttttcgtctcttcaattaatttctctaaattaacaacatctaaggatttcaattctaattcattaattgataatttcattttatttatatcattctccaattcgacctttttattatatttcagatctttatcaatttgtagtgattgaatttcagttcttaaccgtttgatttcattgtctaattcaacttctcttttctccaattgagtaacatccatagtcgaatcattattggataattgctgttctaatttataaatctcaccctcattctttgatatatcattcaatgcacgagtatattttaacacatcattttcaatactcttcaacttcttcatttcatcatctaaactttgaaatttatccttcgttgttttcagttcttcatcataattaaaaatgtctctctttaaatcaacttctttaacatccaattcaggtaataacacttcacgaatatccttaattgtttgaacactgttttggaatgctttcaatttatcaacacattgttttttaatctctgttttttgatcattatttttctttgatgataattcatttgtacgtatttccaatatttcaagaaatttagataattgaaatccatcatcaaatttacgcttacatagataacaaatatgttttttctctgcatgagctattgcacgtttattaaacattgttaaaaattgaatatctttagaatcttcaagttcttcattataattatcttctatattgttcaatgattctgtatattcttctaatttaagttcatctccatatatggaattatacattttttgtaattgcatgaacttggaagttaattcagataattcaattttcaaatgatttctttgttcagagatatagtgtctgttcattttggctttggaaattttacattcaacattgaaaatcttctcattattcaaatcaatttgttcttgaacctctatgatctcaccagaataggtgttttgtaaataatttgtaacttcatgaattggttgaattttatttttaacttctataatctcattatttgtacgatcattaatatctttcaaaaattttattttagacaacacctcagaatcaaatcttgataattttaatttattcttaatagaatctaattcaaattcatccttcctgataagatttgaattttcagttaacttattgacaatcttaccaacttcatcatttgaaatcatttcatttaacatttcttgtttattttccaactgtttacgtaaaacgactaattttgattgattttcaggtacatttgcatattttgactctaattgtgataatttacgcatattattattataatcagtagtcatatattcaacttgttgatgatatttaattttcgtttcccttaccctctccaaattagcattaataccatcaatgacttctttgtaatgatttgatctttgattcttatgttgcgagagactcaattttgcttctcttaaagcaatatcaatatcattctcaaccttactaggatctattaactttttatcatatatttcacgttcaagatttttaagatattgtttctttctatgtatttcatcagcaattgctcttttactagccaaggtaagattttgagattccaattcattacgattttcatcaatttctttggtataatgttcaatctgttgtttcagcttgttaatatgattcaattgatttgcaattgtatttgtaaaattatttaaatcatcttgtaaagcttcacgtggtttattcaaaggctcagttgtaagtttaataagttcaatatttttcaaaagtttttcatgatcatgtttaagtgattcaattttagatataactctttcatagtcttgatttgacgtaaataaagttgataaattttcattaattttttcaagtgatgtctttactgattcaatttcatcattataaaattcaatttcatttgataattcattaattttagattttttcaaattagacttttgtttatcattttgtaaatgttgaacattattattgattaatttaatatcactattaatttccttattaattgattttatagaatctaaaattttaataaatttagaagaatcgaaaatttcatcaaattttttctttaaaactgaagattcagaaattggccaaaaactatcatcttgatgacaaaatacaacataattaagaattgattttgatacacctaaatgataaggtattaatttttcaatatctgcaattttagaactaattgtttgcttttcaccatgattaattgccattaattgattttcctttgttttaaaattaattgaaccagatttaatatttttacttgacatcaaacttttacttaaaatcatattaatatgtttattattaacaaatgctaatttaatttgagcctttgtttcattagcattatgtaaattaggatcattaatgaataatgcaccatttttagtatttggtggtaattcatttgtagttgcatatcttaaacattcaataattgtagttttacctgatccatttgtaccaacaattaaagttaacggtttcccaaactgtatggtttcttgagtttcatctgaaaatgatctaatcccactaatggataacttatagatactagacattgccactccagaagcaaattgagctgagcatttaataccaaagtgccctgtcatagagaaaagacccttacgcgtagtgaataattcgatttgatttgatttgatgtcgcggtcgctgcgtcgtttgagattttctgaaaattttccactaggttcatggacaatagaaaatttatgttctgactcttttaactttggaattaatgcttgcatgtttaaaattaaaagtttggaaattgttctacagatttgaatctctgttaatgcatcttgggaaagttcttttacaacaattggtcaagatgagtgaaaatactacacagcaggcacaaaatacatggatagttccagttactgaaccacgtaaaagtgttttaaaactctataatacattaactcatagtaaagtacaatttaaaccaattaatgaaggtaaaattaaatggtattcatgtggtccaactgtctataattcatctcatatgggacatgcaagaaattatgtatctattgatattaatagaagaattttagaagattattttaattatgatattacatttattcaaaatgttacagatattgatgataaaattattattaaggcaagagaggaagaattatttaaaagatttattgaaaaagttaatggtaatgttaactgaagaaattttaaatgaaatttggtcttcatgggatcaatttgttactaagaatgttaaatataatggatcaagagatgaatttggtaaatggtttcaaaatcaagatttaattaaaattggtactgaagatgcctaaattagttatgtatatgaaaggtgcatttaaggcatgggaatcattaaatgatgaatctaaatcaactgatatcaataaatttttagaaaatactaaggatgttattgtaccaattttagatgaaaaatataaatcaacaattcacagatcatagtattttccgtaaatgttcatcatattgggaaaaacaatactgatttagatatgaaaaaattaaatgttagagaaccaagtattattacaagagttagtgaatatgtacctgaaattgttaaatttattgaaggtatcattaataatggatttgcatatgttagtaatgatggtagtgtttattttaatacaagtaaatttgataatgattcaagtcattcatatgcaaaatgtcaaccatggtcaaaagggtgatatgagtttaattgaagatggtgaaggtaaattaagtagtaataatggtaaattaaattcaagtgattttgcactttggaaatcaagtaaattaggagaaccatattgggaaagtccatggggtaaaggtagaccaggatggcatattgaatgttcagttatgggaggtgattttgttggtgaacatatggatattcattcaggtggaattgatttagcattcccacatcatgataatgaattagcacagagtgaagcatattttgaatgtaaacaatgggttaattatttcttacatacaggtcatttacatattgaaggacaaaaaatgtctaaaagtttaaaaaattttattacaattgaaggaagcattaatggaacatagttcaagacaattaagattaatttttgcattagttccatggaataatggattagattttaaaaaatcattattaaatgaagcaaaatctattgaaagtacatttgataaatattttagtaaaattagagcattaattaatgaaaaggaaggatgtgaatttgaggaagatattaagaaatatggtgaagaggagaaaaaattaatggaagattttgaaaaaatgaaagatattattcatgatgatttatgtgataatttaaatactgcaggtgcaattagacatttacttgatattattaatttaaataatatttacattagtaaaaaggataataaagaaattagaattgatgaagtaaagagaatttgtgaatatgttagtaaaatgcttggtatatttggatttgaagttcgtaaggatggatatggttgggaagtttccaatataggtgatgttaatggtgatagtggtaataataataataaggaagaaattattttaccaattgttaaacttttaagtgaatttagggataatgttagaaacattggtattaagaagaaggatgaaaatagggaaattagtggtattattttaaaaatgtgtgatgaaattagggataaattagttattgaaggaggagttggattagaggatagagaaggtgaaaataatggagcattaattaagatgttaagtagtggagaaattgaagaatatagaactaatttagaacaaagagaagcaagagaggcagctaaattagagaagaagagacttgcacaggagaaggcagctcgtgaggaagctgaagagagatcacgtgcccagattgaaacaaaggatttatttagagatagtacattatacagtgaatgggatgaagaaggtgttccattaaagagtgttaatggagaggaagttagtaaatctagcagaaagaagatggtaaagcaaatgacacttcataacaaactcagagagaagtacggtatgtaatgtaatattaatgtatttaattgtataactataagtcttcatctgaaaccaccgaaaaaagaaaagatgtccgtacagtttttccaccagtaaattcaccggggggatcactgggagatctaagcggatgatccgttgagatcagtggggaaaaatagagggtagagggtaacatactattttttccactgattttctcactttttttggaaattggtgaaaaaaactggaaaacttgaatttctccatttccaattcttccctccactggaaatcgttcgttttcttcttttttttaccgttttctttccctattgataaccatatatcatttaacaaacatgtctgcatttaattttaactttagtgctgatctggcttgttattcattatctttaaatcaacaaaatgtttcaaataatcatttaaataaaaagatttcggactcttcatttttaacctccggacattctacatctcattctccatcgtcaaatttaaattcaatttcaaattcaaattcaaattcaaattcaacttcaaaacttgatttacttattcatactgcaactaatacttcaaataataccccatatcataataactcttcacctttatcatctcaaataccgctaaatccggttaaaacggctcctttatcaacttcactcgatattctctgtttgcatgcacaaaatgaacttaactcacattttgtgaaaaatgaaagtcaaagcagtagtaataaattagtgaaaaacatcagtaccaacaataaaggtaatactgctaataaggttaaattagagaaaaatataaaatctaaggatatatctccaaaggaaaataatagtaatattaccaaaggtggtaaaattacaaaagaaagagttagaaaatcaaagaaggaaactccatcctcctcctcatcctcatcatcagcatcatcatcatcctcctcctcctcatcatccgcttctaatatagctattaaactggcatcaccttctattcatacaaagagacaacgttcaggtccttcttgtgattgttgtagatcaagaaaaattaaatgtgattcagaaattttcattttatcaactttatcaaatataccatcatcatcaaataattcaacaacaacagttgatgaaaaacataattctcatattgctcattgtcaatatatttcaactgacttattatcaaattatcaatattataaaattatcaaagatgaagaacattcacttaataataaattaacttcatttaattatttacaatttaaaccttgttctgcttgtttatcgaaaaatttaaattgttcattctcaaaaggttttacaagaaatgatattgttaaatttaataaaagtgaaaaattcccaactattttaaataatcgaatagatgatcattcattaccaactccttcaccttcaattcaatctccaatagattcagatattgatatcgatgaaaatgatcaaaaattaaataaattaaaacaacaagaacatgtaaaggatgaaacaatagaaaatgaacctttaattaaggaaagaaaatcttcaaagaaaacttcttgtaaaacttgtagatttaaaaagataaaatgtgttaaaattaataataatgatttttgtcaatattgtcaaaagaagaatatagtttgtctttttgaatgattgataaaaaaataaataaaaatattttttcctaacttaaatcttttctaaaattaattctttacttaacattcaatttacctttgtatataattctcattaaatatataaaactacttattataaagctaaaataaccttaacttaaattaaaaatataattttctaaacttttggtggtggaggtggagggggtgctttctttggtggcacacctgcacttacctttgtttttggcggtggtggtggcggtttaacagccggtggtggtggttttgatgtagaaggtagtggtggttttgatgataaagggggtggaggtggtttagaaatcggaggtggtggtttcactaacggcagttgaggtttggtagttgttgttgttgatgttgattttgatgtaggtttagtaaatggattaggcttagtttgatatgattcttgatacggttgttgaggaatgttgtgtttgatgaccttgtggatagtatgattgtggatattcatattgttgtccataataaggaatcttgatatccgtattgtgaatattgatattgttttgaagtactgttgattgatattgctgttgatattgtggtggatattgctggtagtttccattgtatgactgtttttgataaccagaatgttgtcctggatactgttgttcctgtgattgcaatgatcatacttttggtcttttattactctcctctttttcttcaataactctcttttcaacagtactatctccttcacctaattcattcataaaattttcaaattcttcatccatttctttactcttttcatcatcaattttacaatcttttgttaaatgtccaacattaccacatttttcacaaattaatttagttgtaaaactatcaactatttttacattcattaccaatatgtccaaatttcccacatttttcacattttggttcagtattttctctaaatgtaccattcaatttagctaattctcttaattgatttctctttaaatcattttgtccaacagggtgaaaaaattgctttattcataatttcttcacataattttttagcaagttcaactttttcaattgtatctgcacttattaaacaatgtaatctttcttctaaattatttaattcaggtgaaatattttgaatatttttaccacctttaacactaccttgacctctaataccaattttagcaccagaatcttcttgtaattttttcaatgtattacctcttggaccaattaataatccaataaaattaatttcaggatattcatcattcttaatatataatttatcaatatatttacttggttttggtttataccattcaggtgccttataagatggaactaattctaactaatctttcaacaagataatttctctcattttcatatttccttttatatcgtatttcccttgtattacttcttttaccattattatcataaattggagcaggtgatggagatctatccctctcattcatatgatattttaaataatctttactctctaaaatttcacaaatttcatgaattctaatataacttgtataagcttcaatttgttcagtacttaatgaatttaatatatttgttggtgtaggtataccaggattatagaaaaccgccttagaaggttccccactcaatccattatctcgttcccttacacgacctctatccattgtcatccaaatgtcaatgtcttcctcttcctctaagaaggaacacttaacttgccatgttaaagcttattaaacctatacaaaatcaaagtcgacgcagcgtccgtgaaaaactcaaaattttgaatattttcatctcaacatctcaaatttatctctccttaactaaaacttagctatatactacttcactctcccctcattgaacaactagacaaataatggctattcaacaagttagtagagttggaggtccaaacagatgttttggtacctttcaaaaagcattggaatgtatgactaatgaaaatactaaaagtaatgatgaatgtaaagctttcatctgtgattatgttgaatgtagaagacataaactggaaacttataaaatggttattatgcaacaacatttagaaaaggatagatctgatttagatattgaaaaagttggtgctccttatgttaaaaagagagattatttaactccaaagactcttggtttagttggtggtgatgatcatgcaattgcaacttctaaattctaaatttattacttattcttttattcttacatttctcctatattattatattatgtttcatttcttttaaatactatttataaagataactatttattattcaaaaaaaaatattaaattatacttactctcgttataccttatgcttctataaaactaatataaaggtcgacgtttacgaccccatttctgtcttaaacttgatacattaatctcttcaacaactaatccatcttcattaaattcaactttctttctaattttaccaagtgtattatatctttcaccttcaggtgttgtaatatttttattgtttttattactataccattcactattattattatttattaaaccaacattagattttttattacctttactaaatgctgaactaccatttgttatactacttccacctgcattacctgtaaatttaccctttttactatcaataactccttcattgaaatgtggtgaatatttgaaaacttgtttattataaagtttaccagaatctttaacattttcaagttttttaacatattcaaatgattcatttaaaattttataaactgaatcaaatattaattgcctaaattgataagttgttaaaccaatatctcgataaatttgtttactcttaaatttaatcttttcacgaaatttataagtatattcttcatttttaatagaacttgtaacattattttcctttttaaaattttcataacttaaatgtgtattccatatactaattataatttttttatttcgaacactaataacaatacctgcaatatcatccataattaatttatttaaatctttattactcattgttttattacattcaatatcttcaaaatcactattatctaatgcctcctttgataatggtaaagaaatttcatcatcaataaattttccactaactaattttaataataataattcccaaaatatacttaatgctaatctcttaaatttatgatgactattagagaaactaaatgaccatctaccaccatttttattcatttcatcttcccataatggttttataccatttttaaagaaaaaatattcagtatcaattgaaacatcttcaatatttttcaaattagagaatgaaacccaaaattgttcaattgaatcaacaatttcagtctcctcctcttctccttccttttcattatctttattattcctactaagattcacttttggaaattttaaaatggtagtatcctgaagatactgtgcatctcttttatcaatatcacttgctgttaaattcacacttgtatcatcatcatttatattttcattttcattttcattattcactatttcattatcatcaagttcatcatctttctcttcatcatcatttccctcttttcttctttctcttcttcctcttccttggaagacatacgtaaatgttgccaaaaagtccaatcataagataatttatgcaatgtcggttctggatcttgactcatactcatattcatagtattattactgttattcaccacattagattgtgactgtgactgaaactggttaagaaaccctgaactatcaaatattctagacattatacccccttgctatactatacttccttccttccttacttacttcttcttcttcttcttcttcttcttcaatgaaaagtgcaaaaactgacactgtggaaaactcccatttttttcccagtcacacaacaattagttttcctcgcttattcttattatgttattctttcacgatggctcttcctttcacaagggaggaatgaaatgagcctttctctaaatgtacgtgattatgatgggaatatagtaactgaagagtatcccagaatcaatgattgtcaagggactattaattatgaaggttatcagaaatacatcgaagataattacaaagatttacattgtatggatttaaaggcatatgtgaaacatttagataattatcaagaattaatattgaaagattggcaaatattaaactcaattcatgttcaatgttatgttggattgaaaaatcctgatgatatttgggatagtttatgtaaacgaatttataattttggatttattggtaattattcacgtatttgtgataaattagagaatggttataattatatcttaacatttgatgaatttagtcatatttatccatttatgagaagttgtattggtaatgctgcaagtttaagaagaatgaacaatttagaaaatctcgatatcaaaacaaatgatgcaagcaaattatttcatgatgaaaataaatttgttaattttatacataaaatacctgaaaataatcaaaatttgaaaaatataacacttttgaggagaagtgtatttaatgaatcaagaatttataaaagaagattgggtaatccaccaggttctgaatggactcatttatcaattgaaaatgatttagttaagttaactgatagttataggaaaaatattgaaaataatttacaagatagatatggtgtttatgaaaaatatttattttgtgttaataaacattgcccgggaaaaatgaaaattatattagattgtattcataatgttgttataatttcaatgattaatccacattttagatgtttagaaactcataaacgtcatgttttcgatatagttaggaagttattcattatacataatgcagatttagaattgattgataaactgtatcgtggtatacctagaaaatatggattaacatatgttgaagcatggacttcattagatgaatttaaaccattagtattgaatgatttaacaccaaattttttcaattatgatcataattataaaagtaatggagaatttagttggtcaagtactaaaaagagaggatctgttttagatttttttaaaaccgatggaattgaagaatctgattcaaaacgtaggaaaattgaacaaaagaaaaaaaatactattaataaaataatacttgaagatcgtgatatacttggtattaaaaattgggaatatgatttaattagatatgatcaattcagtaactttattaaaagagatgaatgggaatttcatttaagtgaagataaacatggtaaattaagagaaatttacagaatttggaggaaagattattttgaaattgaagattatttaactacattatttggatcaaataatccatattcatttgtttttgcatgtaataaattaataccaaataaggttgaaattaataattcaatattttattgtgagaataataaattaaatgatgtttcaattgatgaaatttttttaaatataatgaaatataatcaaattaaatgtttgagagagtttcaattaatcgttcaacatttatacacaaaatttagatcaattaaagaaaatgttcatcaaattttgaaaaatccagctaattatattacaccatatccgttaaattcaaaattgaaggatttacctgaattaaatgagaaaagtatatcatcagcaaaggaaatgattttcatttgtttatcaaatgaagcatttattaattcagatgaaattataatgtatgatatttgtgataatgcagtgattgaaccaattaattcaattggtttaggttataataatgaaaaaatacgtaaacttaaacatcaagcacatataacgtcatatattaaacaacttgaggaatatgataataattggatgaatagtagatgtattaaagaatgttattttactggtaatcctgaaaataaaagtccttatagacaatcaaataagaaacttatattaaatagaaaaatggatagacttgaattatattctatttataatgattataaggataatggtaaagaaatcaataaagctgtagttttcaataaggagaaacatgttgggaaattagattatgaggaaagtttaaaagttattttcattaaatataaaatcgatgatgtttatcaagatgcatatttgattttaaaaaatattgattcatattttattaaagttttcattgagaaattattaaaggataggataaaatctggtacacctaaatttttcaatttaacagatgataaatttttacttcaaataaataattgtaaatgttatacatttaatcaattttatattgataaattttacaaatttgttaatccgattagtaaatataaacttttcgaaagtattttaacaaaacaatttgattcaaatgatctgattcaacaaaataaaatttatttaccaagagttagaatgagagatagtgataaatttgaattgaaatcaggattaagaataattgcaagaactgctggaaatgcaagaaatataattaaaaaggagaatgaattatttgaaaaattaaatactttaagagatagatggttagataataataataatattccaattccacatagagatagtcaatcacttgtagataggataaggtatacatcatttatgattaaagaaatggaattaaatgaaactgagagagggagttttactaaaatatttgaaatgttaagggaacaagttgattttaaaaatattcgaacatttccaaagatttccaagacgtaatattgttgaattagttaaagagttaaataagaaagttatgtgatatatatatatatatgtatatgtaaactatgtaataataaatagaggtaagatagataaatataaatataaaatataaagaaaaggattcaaaaataataacgagtatattaattaaaagatagaaaaggtgcccggatatatgaaattaaatttattttacatttcagataatgttgttgcataactttcaggataatcacaatcagtataatctaaagcacctaaatcttttgttattgaatgattagtattcttattattattattattaatttgattattatgagaagttaaaggtattgcatgaattgaatcatctaaatctgatgaacacgatatatcatgagtattattattatttattatatttttattatcatttattatattattaatacttatttcttgaagaattattattatcatcatgatgattataatcataatttgaatcttgtgaagcttttgtaccaataactgaaaatttaggtttttcattatcatcatttaattcttgattttcattacgttcataataatcaatttttaattcatgaacaatatcaaaattttctgctaataaagcagtaacagttgcttgaccttcaggaatttgacccttaaatacaaatttaccatcaattttcatattatcaattgaatctaattttaattgataaggatataattctctaattgatgaaataccacccattctctttaaatctaataaacatcttctaattgttgataattgattatgaattggttgtaaactttcactaacaggttcagaagattctaataatttataaataattgcaaaacatgatcttaaaaggtaaagtaaaacagattgacctttaaaatctttattaataaaataaccattaattcttgaattatcaatttcaactaattgtttttgataattaaaaatatcagttgttcttaaagtccatctctttgttaataataaattttctaaaattgattttaaatttaataatttttcataaattgaagttaaatttggatcaactctatcaattccaagatgtaaatcatttaaataatttgaacaattatcaattaaaccttttataatacctgaaccttttaaattttcatcatttgaaaaaatttcttctgctttaatttgacaattatttaatttataagataattgattaatttgcatatcatcatgaatattttcagttattaatttaaataaattatatttaatatctaataaattatccattaaagattgaacatcatttgataaatctgaagttttatccatcataaaattatattcattataacaaatatttaattttttattaagtaaagaaatttcagttgaaatttcattattatttaaagaatttgaatttgaattattcttagtttgatcaataattttagaaatttcatttaatctatcattaattggttttaaatcatgaggagtataaattgaagattcatttaaatgttctaataatctttgaacagttgataaagaagcataagttgcaggagctgtatttgataaaccacatgttacaaagcaaagtgataaaagttgaaaaatttcatcaataagtacatcaacattattaatattatcatcagtaatagtatcatcaatagaatcttgtttaccatcagattttctaattttatataattcttcagtacattttaaaacattttgataaatttcagttatatcctttgaatccataaattttgaatgatctcttttaataactgataatttttgtctatagtcagttaattgattgaagatagataattcattatcaggtatagtatttaatctattagtcattatatatggttcaattgaatatagatataaggattaaattcaagaaaagaaataaagaattatcgatatatttgccattattaaatccattattgttaaatccatgctgtctattactattttgacgacatcattagaaatttagaaaaaaactaaggcactccctaaatccgcgatatttaaaataatttccatttgattaggtaagtcttgattatgtaataaacagagcacgtgaccattacataagcaatgcttacctaattaatatcacgtgatacgttgttgattacataatcaaaataaaagtagacaaagcgcgttttgtcctaagttacgcctacctactactactcctactttctagaactcaactactgctataatgacttgtagaaattttacttttcttcacttttttcaattattattatattattagactttatattattatcaatcaatttattatctattcatattcctattcatattcatattcatatctacataaacaaaacatgcatttagggataatatcgttattatcaatacttctatcaccagttttagcttcaactaaattaggttgttattcttcaataccttcaaattttatatctcaaggtgaatatacttggcaatcatcaggtcattgtactgatttatgttcttcatatcaatattttgctctttcaaataatatttgttattgtggtaattcatttaatgataattcatcttctaaattatcagatagtcaatgttcaatagcttgtaatggatttcctcaagaaacttgtggtggtcaaggagtttataatatttttcgcaatggctgataactgttagtactgatagtcaaagtagtactagtgaaactagcagtgaaagtagtacatcattttcaactacttcaagtacttcaagtacttcaactcctactacaacatccacatcctcctccacttcctcatcaacaacatcatctacagattcatcatcatcaacagaatccccatccatccccatctccaacctacagacaataccaccactacttcatccacctcttccacctcttccacttcatcaacaacaacaacaacaacaactccaacaacttcagtaatagaagctgtacatgcatcacaaacgattgttgtagaaaattcatctcaaactgttacttcagtagtttatataactcatacttcaactccaacttcaacttcaacttcaacttcaacttcaaatgaaaaatcttcttcatcagttaataaaggtgcaattattggtggtgtagttggtggtgttttaggatttttaacattattatttgcaattttattccttttaagacataaaatttttagtaaatttaataataatgataatgatgattctgaatcaattttagctgatgatatagcctatgaggaagcattgaaatcaaatcctttttcaagtgaagatgataaagaagctgataaaattttattaggtagacgtagattaagtgatggtagtttagctgatacaaatgattatggtatgaaagttttacgtgtggctaatcctgatgatgattaattaaatcataatattattatatgatattacttttcaatacttttatttttgctttatcccccatatcccattcagttcacattcaattcaattcatttccattcatttctcatatcatttttgtatttatatcttttataaacttttactttcatttcataaaatttcatcaatttacttttctgtatttttatttatgaatgtttgtctttaaatacaatttacaaaaagaataaaattttattgtctatatttatttatttatttatattttctaaattagatatatttataaggatttaaaataccatttggatcataatgtttctttaaatctttcatcatattaatttcagtttcacttttagaatatttaatataatttttcttttggaaacctaatccatgttcagcagaaattgaacctttatgactttcaataaattcataaacaaatggttctaatgctttttcaacttctttattatattctctaactgcaacatttaaatgtaaattaccatcaccaatatgaccataaccaacagcttcatagacaggtttcttattatcttcagtacttgataattctaattcatttaatctctctttaacactttcaactaatttatacattgaatctaatggtaatgaaacatcatatttataaacacctccaaattgttgtgatgcctctgcaataccttctctccatgtccataaagttttcaattgttgttcatcttgtgaaactgtaccatcaacgacaatttctgattccattacatcttctaaaaatttttctaatttaatatcatcatgttccttatttgaaccacttgtctctaataaaacataaaatggatattctggaactgattcaataccttcaatatcatcttgacataaaggatgagttgtctttaatgtttgagctgctaataattgtgagtctttatccataaattcaaatgcacttaaaatttcacctaattcacttttagccttttggaaacatttagtaacttgttcataattttctaaacctaaaaatgcaacattaacagattttggtcttgcaggacataaaattgaaacaccagttataatacctaaactaccttcactaccaataaataattgtttcaaatcataacctgtattatcttttcttaatgaatgcattgaattataaattgtaccatcagctaaaacaacttctaaacctaaaactgatccatgtaatgaaccatatcttaataatcttaaaccacctgcattagttgcaacattaccaccaacaaaacatgaaccttttgcacctagatctaatgggaaaatataaccattttcagataaataattatcagcattttctaaaataacacctgcatcaacttttaaaatacctgaactttgatcaaatgatctaatattattcatacttgctaatgaaataacaatttcatcgaaaactggtactgaaccaccaactaaacctgtattaccaccttgtggtacaacagctaatttacgttgattacaatattttaaaatttcagaaacttgttcagttgtctttggtttaagtactaatttagattgtccaatatattttttcatccaatcttgattataacctgttatatcatttgaatcagtaattaattgatttggtgataaaattttagagaaatgattaatatcttcatcattaattttgccaaaatcacctcttttaatattaggatatttatcagctgttaaagttgatgaaaatctttgacaaagaggtatgttccttgtagatctagtgaataatctaagcattgttggtaaaagaagttgaaatcaaaaggataatgattaacatgactccacaataataaatttcaaactgactctgaaaagttgaatttttcagatttccaaaaccgctgcgtcttcctaatatggtaatcttgacacctaagcacatgatataatttagaatttccctttaacaagtccttttctttaaacaatggcaagaaaagacgttaaaggagtaaagaaggtatccgttaaggaaatacctgcagtggagaaacctttcaataaatctacaacaaccacaacatcatctaaaatatcatggtatgaagaattatcaaaatcaattgatacagcacttatacaatataagaaagatttagcatcaagtagacgtttaagattaattgatacatttttagcatttttaatgatttcaggtattgtacaatttgcattttgtatattaggtggttcaaatccatttaatacatttttatcaggttttggtgcttgtgttggtcaatttgttttaactgttgcattacgtgttcaatcatttgataaaaatcctgaaattgcatttggtgaatatgtttttgcaagtttattattgcattttgtacttgttcattttatgaatcaattagcttaataaacgggggaaaaaagatttaattatttatataggatatagtataaatagatttaaatttagataaagtacttacttagttacttacttagttacttactttaacttataattatacaatactcatcatttcgctaacattatcaccattaccatcaccaccatcttctactactataccatcatctaattcttcatcttcattaccatcatcatcttctccatcactttctctttctgtatcttttataatttcatcatcatcatcatcattaccattaccatgtatttcactttcatcatcttcattatcctttatttcaggtatactaaattcacaatttttcaattctaataattgattttgattacgaggtgttgcccttaaccattgaacacggggcccacaaggagcagtttcatgaattttaaaaccaaatattttaagtcgaaattgttccttcgtacgagcttgaacttgtctattaatttcagggaacattttcataaataaacctgcaaaacttgtaccaaagaatgcaccatcaatatttaaatatcttgaagaatttggtaaataaatatcattacaatttggacaatataaacgtacagtttcaacacctggtgaatcaaatctaccaattggtataaaattcatattatcacaataataacgaggacatgaaccaaaacatgtatcttcatatttttcagccattgcatgtaatccttgctttgttaaaatatatcttgcatgtattaaaccatataataattcagctgcatgttcaactaatggtaaatcatttgaatcaacagtagtttcaggttccatatctaaaattaaatcaagtgcttgtctataatatggtacaattgaacctaaaccagttaaattaaaatcatcttcaataaattcaggtgcaacttcaacaaaataatcatgtccaaattgtgtacagaattggcttatccaagtatctggttcatcactagtatatgtttccattgatatataatgtatgttactctaataaaccactatctactactaatctaataaaaataaacccatggtagtaatagtaataatgtatcagcactgcatccatccactctcacgctttttcaaaattttcattttccatattaatattatttattattattgattttgtactgggtcacttatcttatactatacatactacaatgaactcattagatacagtaactatactagcaatattggtatttataatatcattattagataaatctacagttaataaatggatatctacaatatttattaaaaaatcaccacaattagattcacttaatacacttataaatcaacgtcgtgaaattgaaattgaacgtaataaattatcagctcaagataattatgcacgttggacaaaacttaatcgtagattagataaattagatattgaaattcaatcaatttcatcacaaattaaatcatcaaatgtaacatcaactgcaacaatttcaacaattgttacaattttattatcatctccacaatggattttaagattattttatgctaaaactgctgtaatgcatttaataccaggtataaatacatttcctaaaccattttccctaattttaagattcccatgggggaaatacaatacagtgggtgcagtattctgggcagcagctattgatattgtgttaacagctattaagaactggatagtagtgacaaagcagttattaactgtatctactactaatactaataatactaatactaatactagtactaagaccgacgcgtcgaaatgaaatgaaaaaccaaaaacgcggtttctcactctttgtttacttttcacagagaagaattattttattttattttattttattttgttttcatgacatgaggaatgaataagattttatgtttactatattattagaatttgcaattgttatacatcacttttctgtgtatattcttttcttttattctatataataataacattacatatcacattcattttaaatatagttaatttatagttatagttatagttataaaataatgtcaagattatctacaacttcggcatcgcttgctctatcagctattcttgatgataacactaacaacaacaacaataataataataataataacactaacaatggttcaaatgcaacagtatcctcaatatcctctaaatctactatctctaattcaaataattcaaattcctttataaacattcatgtatcaccaactcatcgtaaggcaactagactgacaatgcaaagttattttgataaggaaaataataatcgattgtcttctaattctgataaattattatctccaaaatctcaattaactcctctgaagcaatcaaatcaaaacttattaaatagacaatcattacctaattcaattgtttcttcaaaatcttttaaatcagtttcaactactgaatctgttaaatctccattaaagaggaataatatcaatagaagatcacatttatctcaaagttcaaaatcaacttattcctcttattcttcctcaaaatctaataatgatattaatcattcaaataatgaaaatagacattcaattgataaaacacttgttaatgatcaaatagagaagaaaattttaaatgaatcaaatcaaatgaatagttcttcaactcaaaaaaataccccaaatatccattcaaagcaacaaacagcagatctctcttcattagatgattcatttcaagatgaaactttatatatgcaatcagaatcaactaaatcaataaggaaatcatcttctttccgtactttaagaaattcattatccatgaaatcattagcttcaacattaaatataaaacaagattcaaattcaaatccaaatacatcattaaatacatcatcaaataataaccctacaaccaaccatccagacagaaggaaaagtttaaatatcaaaatgaaaaagaaaatgtcattggaaaatattagatcatttctttcaaataatagatattcaatgagttatgataattcaaatgattataaaaataatatatcattacctattatgcaacctcaaacaaaggataaaataagaaatagattaagaaattcaacttcaattgtatcaatctcttcatttacatcagatgatcataatacaaccattcacagcaatatcagtagtcagagtactaataatatcaatcataatcataatcttcatcatcatcaccaccatcataatagtagcataccagttgatgtcaatcatttaaatattttgttgaaattatgtaatcagcaaaagattatatcatttaaatcatacatgaataaatatcaagcatcaaataacaggaaacatttaacattagttaaaaataatgtaacaagtgataatttaatacttcatgaatttacaactaataataatttaaatatgaatataaattataaatataaatgatcatgaaaatagtttccaatcagatgttaaatattcaagtgtttggaaaataattccatttgatttagataattcaacaatgagtaagatcattcaagaattagcattaacaattgcaatgtcaacaaaggaaggttttgtttcaattatttcagcaactgttgtatctggttcattacctaattcaataattgatataattgataataattatccaaatttaaattcaaatgatcattatcttataatgaaattaaaatatggtggtatttctttaaataaatttaagattcaatcttggcaagatgcttcaataatttttaaaaatattttaaatacaatttgtattggatcaaatgaaaattatgaacatagagatttaaattttgataatatattaattaaacaattatctaatgaaaatgaggaaagtaataaatttcaaattacaattattgatcatgcattagctcgtggaattgtaagtaatcaattaatgtttagaaacttatttgatgcagaattttttaaaggtaatggtgaatacagacatactatttataaattaatgagacgtgcagcatcatcttcaactttaccaaataatttaacatcatcaacaaattcaagtaattcatcaatatcacattcaatttcaactttaagtattaatacattatcatctgatactaatattgattggtcaaaatcttatccaatatttgatttactttgggtacattatttattacatataattatttatgaaaaaaatttaaaaccaattaaaatgaatccaataatgaaaagaaatggtagatcaatgaataattcaaatgaagttacaaaagagataattgcctatgaaagattattacaaggttatagaatggttgaaccagcagttttattcggtcatcgtaaaaataaatttatgagacatgttaataatgttcatgaatttaaagattggtttttaggtatataaaatttatattaacgttaataaattacattataaaatttataaacaatatattccaaaaatacttaccgaagaaaggacaagacgagtccttagagataaccatgataagatacttttgcaatcagaaaagaccatgatcgcacatgctgatatgatgaccaataaacatggggggaacaattacagtctttaatacgtcaatctaacatgaatttgattggatctattgaaaaaaaatgtaaaaaagtcaaaaataattgctggaatggtaatcgattcaacaagctccttaaaagaaattcaaaccaaagggaataatatgttgcaaatgatgactgctttatctaaaaaccataaaaaaacgcagaaatcaatgaatgcgatgcttggaaaattgagacaaagggggaaacgtaggagagattgtgaagacgataacgtagaaatggaaacaaggaggttttttcatattgctattgaaaaagaatatcaattcaaccctaaaatctcatttaatcagtttgtttcagattggttttatggtgatcatcatttatatgagagtaccaaactagacccggactggaaaaaaaggaacagagcttcatatttcagatataaacgtctagctaaaataaagagaatttgcctggtattgatgatgatataaatgttagatctaaaatggactcaattattgactactgtcgaaataattccttagaaattctatcgacatcttttggggtagggaaactagcaaactttttaagtggtaccaataagcagctcaatgccacattcacaacgccagaattacgtgagcaggtgctggcatcaatcttgtggaaaagcataccaaacatgtgtcttgaataataacgtataagctgtatataataataacattaattataatctatatgataatctatatgtaataaaaattggatgaaattacaatgactcctaaatctattatcaatgctgtggataatttattaccttttgaaaaaaatgtgataaccctttcggtggatgtgttgttgttttaactggtgatttctgtcagtgtcttctggttgttacgaagaatcctactctccgggaagtttttcaaaggtgtgttttgtgctctttgtttgccgatgatattcaatttttgaagcttactgaaaatatgagaattttatctacatgccccattgaggagcatgaagctagacaagctattgctagaaaactcttagatttaggtagtggtttcaatattgctcatggtgacgggtttgaaaatcttttggatcttggtattaatgaagatcaattttttaaactaagtgaaggaaagaattttttagaagatatttatcctaataatcaactaaagtttgccaaacatttgaaccagcctgaaaaattgcaagctttgatggatttgtatgcatctaatctattttcatgatctatattatcaacctctctatgaacatgatggccaagtcatagaacttctacgtataaacttcaatcatactcctgatgaaagactctctctatcaaactcactgtttgatactaagagacgccttcaatctaagaagattaaaaagaggaagtagtggttaataaattaattaaattaaagttgtccataatttttttcgtgtcagtggaagttggaaaaaaaattgaaaatttcaaaacctactcagacgcgtctatttagaagatgtgactttgtttacgtttttaatgacatgaatattttattgatctcttgatgatctacaagttgtctgatttccttcatttcagtaatacaacacagatatatggagagtgggttacataggctatccctgaatgacctgtctacagtccatgagcaggatgaacgattgtttttggaccattcaaggaaatatgcaaagctgaacaaatacaaagaatcaaaacatcaatcagttgaagaagaaagcggatttgactttgatgatgatttcgatgataataatgattttgataacattgtacaatccaaaattaatggacaacaacagaaacttaaatccactggaaaaaatataatgcgtacacccatttccaataattttataacaatgtcaggtaggaataatagtgtcatggataaacgatctatatcatccacttcttcaagaacttcctcatctataagatctcagtatacggaaagtgacactgataatagtgattatgctcaggaattcgaagattttgaagattttgagaatgatataaaaactaatttacttgaaaaatttagacaaaagcaagaaaaggcaagacaagaagttgaaagaactaaacatgaaaacttgttaaaatatagtcaaatacagaatcgattaaatagttttaaaaattcttcacattggaattctaaatattctaattatgttgatgattattcaaatgatgaagattttgaagattttaacaattttacgacaagtgattttcagaaattatcaaggtttaacagtaatactaactcaacaatggggaagaaaaaatccatgcctgttctcaaaatgggtacaagtttaaacggatcacctaagaagattaaaaaatatgcatcgacactagatatcaacaacactattagaaatcaagatacacttaaaagaaatcaattacaaactattagatacccattatatattgatgaagatgatgtggatgatatacaagatatggatcgaacaattacattagcagattataaaaaattacaaagaaaaatgcaaaatatacgacctattgatttatctaaattttcagaaactccatcttctaatcatattaaaaaatctcgccatagtaaacatcataaacacgatagtgaattaaataaaccatttttaactccacaaacttctaaaacttcacaattaacaaaagaagggaaaatcagattaattagatcattgggtaaaccgaaagtgaagaagacattacctgcacatttatacggtgaattatcatatgatccatttttgaaaaaatggtgtggtaatgatgaagatttagctagatttgaatcaattaattattctaaacctaagctaataagtaaatctgaatcaattcctcgatctgttaatggaatggtatatgatgatacaaaattaagatgggtcagtgtcacaggatcttatgaggatgatccatttggtgatgattttgatgacacggttcatatgaaggaaagcgatttgaatccaatcaatcaaagatatgcaagcagtacacataggagtccgcataggagtaaaataggaaggttggtgccttcggaatccactatgacattaagtgataatttgaaagttaaatcacattttaaagttacacctgagatgtataaagtgtggaaaaatgaagaggagagatggatacgtaaagttggtaactggttcccagatcaagaagatccacatgctttcaaatacgatttgaaggttttcttgaatcaacaataatatagtataagtaaagcattgtataatattaataggacgattaagataaagataaagataataacattaaatcaattgtggcataatttagtggggctcgccattccgcattaggtaatattttttcttatcagtggtgctaaatttccgcttttcaacgttttccacctgatgtaacacacagtccatattgtgtataaatacctgcagtgggtacacattcggagttgaattataagaaaattcttttgagcttattactaggcaataatggtagacaaagattccaagattatattagttggttccggtgttttcggattatcaaatgctttacatttggccagtaatggttacaaaaatgttactgtttttgacagattagaccttgaagcacaaagatttacattattaaatggctcagatacagcctctgctgatattaataaggtgttcagagcacagtatgcagaaaagaagcattatcaagaccttgctttccaggcttttgaagtttggcaaaaatggaattcagatattcaattactacccgaagaagagaaaaataagtttactgatttgaaattattggatttatgtggttatatgaaacttgatgatattgatgggtgggaagaaaaaaaatctcgtgaaaattttgtaaaggaaggtttaggatctttgaatattgacatctcaaatgaaaatgatgttaaaagagctaaatatttaggtttaggtaataaaatcaattttgccttaaacttaaagaaaaaatacccagaaattcaaggtactttggatttaactgctggtgttttatatgcttccagaactttacaatacgctttttatttatgtaaaaaacttggtgttaaatttgttttgggaggaaataaaggtacatttcaggattttatttataaatttgaaaatgttgttaatggtattaaaactaaagatggaaaggagcatttagccgatttagtcgttgtcaatgcaggtccttggacaacaaaactagttcctgaattagatggaattaatgaagcagctgcaggtaatattctaattgcaaagattccaaaagatagaaaagatcttttcatcaagtacaactccaaaaactttccaatgtttggttggaaaaatggtcattctagagaacatgatcatatgggaggtatgttcttgtttccaactatggagccagagggatatttaaaaattattgttagacagacaaaatacactaaccctgttgtcactgaaaacaaccaagttatttcagttccaaagacaaaaaatagcttaccacctttccattacttaccaaaacatattacaaaccaagttaaggaatttttaaacacttttttcccggatttgaaaggtttgaaatgggaaagtagaatattatggtatacagatacaattaataatgattacatttatgattttgttcctggaaaaaagaatttatttgtggcatgtggtggttccgggcatgcttttaaaatgttaccagtgttaggtcaatttttggtagataagatcgaaaaaagggaaaacttttacacaaatttattttcttggaaaaatcacacagaatttaaaggtgatccaaatggtttgcaagagaaattaaatagctctcgtgcttatgacaaacaaattatttcggatgctaaagattataatttttctgatgatgtcaaaccaaaattatgatcaggtagagaatcaccgtattgtaaatattttatatttttttttttatttatacatggtaaataattagtaacgtagagatatacattaatgataaactaatctcatgatgacttcctgtattccataaatatactagaaaaataaaaaattatcaagaacactatattcatcgaaataataaatgacgtctactaaaaagcccagttaatgttctattgttttttacccgaaattataacagaccttttggcggttagtgtttaattccggtactaataatagccttttcttttgaaaaactcttgaaacatattcccgaagaaaaaaaaacatgtagcttatgctaccattgaaaagtcccaaaaaggaaatattatttttatcaaaacatgaacttgcatttttttaagcattttctccaacagatttattctttttccttgttttaatgctatttttcagtaaaacttcttaaagaacaatagttttgtttcaaaaaaaacaagatctgagttatgatctttgttagttacaccataacaaaaatacgagattatcaactgttttccatttgtaaacatgaatgtttcaggttttaaaacctttttcttttttcaaactcttccaaaatatacttaaaggacacatttctccagggtttattatgcatcagttttctatgttgaatttcagactctgttccttattgatcgtttcatttaactaaaaagcacaactccgatcaatgaatattttcaaatttataatattatctgttttgttacaatcacaatctgcttctgcaactccagttaaaagagctgattgtaatccatttcaaagaattacacaaacaattacacaaacagtttatagtactgatgcagctggtaacacagttggaactagttataactacaataccattaccagagacacagttgttgactgtgcagattcttacttacctactacaactgaaagaacaactgttccatctactgaagtttccacttttactcattgtgaagaaaatgagcattgtacaagtactgcttttgttaccccaatttgtgataatgatacttcttccgcaagttgtaccgttcaaactactatggttacaggtgctaataattatgccgttgctgttcatactacctcatgtgaagcacctgctggtgcaactggttccttccaatgtcatccaactcaagctttagtcggtctaaatggtgtttctgcaacttttactgttacaaattgtgatattccagactttacttgtcctgttcaaactactacaacttcagtcactgattgttcaggtagtgtacaagcagcatattgttcaactggtttaacaactacaagtgttggtgatcatccgcttacctttgctactacacaatgttctatgcctgctggtctctctggtagttttgctacatcagaatcatatacaacttatgatgcttttacaacaacagcaaccttaactattatcaatcagaatgttccaacttttgactgcccaactacatcatcttcattaactacatcttcttcttcaactacatcatcttcattaactacatcttcttcttcaactacatcttcttcatcatcaacttcatcttcatcatcaacttcatcttcatcatcaacttcatcttcatcattaacttcatcttcatcatcatcgtcatcaattccaccaactacaatcacaactattattactgattgctccagctccacccaacaagctacttgtactactggtactaccaatgtcattgttggtgattccactgttccagtcattaccacctcatgtgatgttccagatggtttaactggttcatttgttaatactccatcagcaaccacatattcactaatgaattactactactgttattactgtttccaatggtattgttccaagttttgtttgtccaacctcctcatcatcagttccaccaaccactattaccaccctcattactgactgttcaagctctacccaacaagctacttgtactactggtactaccaatgtcattgttggtgattccactgttccagtcattaccacctcatgtgatgttccagatggtttaactggttcatttgttaatactccatcagcaactacttacactaatgatgttacaactactgttattactgtctcaaatggtattgttcctagctttgtctgtccatcatcttcatcatcttcacttgctccatcatcaatcccatcatcaatcccatcatcaaccgttccaactacttcatcctcatcagcaccatcatcagcaccatcatcagcaccatcatcagcaccatcatcagcaccatcatcagcaccatcatcagcaccatcatcagcaccatcatcagcaccatcatcagcaccatcatcagcaccatcatcagcaccatcatcagcaccatcatcagcaccatcatcagcaccatcatctgttccaactacttcatcctcaacatcaatcccatcatcatcaatcccaccatcaactgttccaactacttcatccacctcatctgttccatcatcagttccatcatcaactatttcaactacttcatcctcatcatcaattttatcttcttcttctgcttctaaatcttcaagtactaccccatgctcaaccactagtactgtttcaattccaatcactaattgtgaatttgttactgaacaagcatcatgtattgaaggtgttggtgcaacattaattgaagatacattaatttggttcacaactacttcatgctcaatgccaactgatcttactggctcattcggtccatcaactgttactaaatcaattactactggtgatattaccacagatcttgttttaactaactttgttgttccatctgttgtttgtccaacaatttcatcatcatcatcttcttcttcttcttcttcttcttcttcttcttcttcttcttcttcttcttcttcttcttcttcttcttcttcttcattatcatcatcatcatcatcatcatcattatatgttccatcttcaacatatgtttcatctactcatactcacactactgaatcaactgttactgttacaactacacattgttcagatgataaatgtactgaatcatcaactacatcagttactactttatcaactactatttcatcatcatatggctcatcattagatagcacatcatttactccatcatcagttgtcccaactactgaaccaagtactcctgttaaaccatctactccagttgctccaggtacttcatctactccagttgctccaggtacttcatctactccagttgctccaggtacctcatccactccagttgctccaggtacttcatctactccagttgctccaggtacttcatccactccagttgctccaggtacctcatccaccccagttgctccaggtacttcatctactccagttgctccaggtacttcattcactccagttgctccaggtacttcatctactccagttgctccagtatacccaaccaattcaactacaagtatctcaatcacagtttcaacaccagttccagttccaagtgaatcaatttacgaaggttcaggtaataaatttacaacatcaaatacaatttttggtttaatgtttggtttaattatgatggttatttaaataatttaaaatttaatagttcattgtctctctttttttattcaatcgttttgaatgtttttattatttatgttctttcattaaaattttaacagactacctttctttttttgtataaaataaaatattacatacctcttatataattcttaaaaataattataactatttaaaaaattgaactacgaatatgaattaattacaagtaaaatttaagtagcatgcataaattgttttaaattataaatctatatagaagagaatgcaataaaaatatccaattaattaaagggtatcgatatggaacagttatttttatatttttttttcagttatatattattagcactattttggtatcataaacgagggatttcacctaaatgtgaaggtgaattagagtttgattgtgattctggtgcaggtaaatattcatcagtatctggatcatcagtatcatttgaattacttgaactcttaattggatgatcattaatattattttcatcatcaatatcactatcggaaatatcatcttcagaactatggtttaccaatcttaaaggtttgggacgattaacaaaaaaccctgtatgactttcagtatttgaacgttgaactgaattagaatttgatgttaaatttgaatttgtatttgaacttgtattatttgttgattttgtaaaagtatttatatcagtattcgatgaaaaattaccctttggttcattagcaattactgataaatcattatcatcatcaaaatctccaccataaacattatttggattatttttcaggattggtaatccaataaatgcatgtctaaaagttctcttaaagaaattaccgtcatcaacagcaatacctgcatctttaccatttgaatcaacataattttgtactgaattctgttgttttctacggtataataagagtgaaacaattataattgcagcaatgacaggtataccaacaccaacaccaacaccaattgcaatacttttatcccttgatgtaatacctgaacttctaatattagcagttggtgctgcggttattgtttgaaacattgtaactgtacttgcactatttataatggtagttgcacctaaaacaatataagagccataatttgaggagtattgtgtagttgatgaagcagttgttgtggttgatgatgatgaagatgaggaagttgtggaagaagatgatgatgatgatgaagaggaggatgaggaggaggaggatgatgttgttgaggatgatgatgatgttgagaaaactgtggaagatggtaaggtggataatctagatgtggtagaactagatgatgaacttgatggaattaaacttgagaatgatgaagttgtaaatggtggaatagatgatgagcttgaggatgttgggttaaatgatgagaataatgaaaaagatgtagtagatgatgaggatgaagatggtgctgtacttgatgttgtaaatgatggaacagaaggtaaaaaagtaaatgatgaacttgatgatgaagttgtaggttgtactgaaaagaagaaagatgttgacgaagatgatgagcttaatgagcttgtagttggtgtggaaaaaggatcaaaatctgaattacttgatatatcagaagaagatgttgaagaaacttcagatgaagattctgaggatgaagttgcagtattgaaaaaatttgtatcatcagaagatgaagaagatgttgttaaactattttcagaagataaagttgaaggagttgttgttgctgatggtaaagtaaaggaattaccattttcatcagttgtttgagaatcattgtcagctctaatttctaatttaaaacgaggtatgattgcattatttgaaccttgcataatatgacgtataatattatttgcatgatcagcagttgaaaattcattattaacatgatcctcagtttccatatcattatgattttcaagttcttcaaggaaaatggatataaacttagaatccatggagacattatctgcatttaatggatctatgttcaacgttgatgaattatttgatttagtattaaagttattattattattattattattatcattattttcattatttgaatgagtgaataaatcactacatttatgatcaagttttgaaggggtagtagtaactattagggttaatagtactatcatggaaagcataaagaaaaatagcagtaagcatattttaaaccagttcttcctacttgcttttagtttatcattcatgatattattctggttattctgtatgacatttttttcaggatccatatttattatgagattattatcattattactgttattattattatttaaccacaacataacgaaggagactgtttaatagaaaacgagtgtagttaaaatgaaagagtgaataaatgaaggtaaataatccaaatgtaatttaaaagggatgtcagatatattgatgatcaaaatcaaaaataaacttcaataatggaaatatagtaaattcaggtacttcttttggggtttgtttactcctttaaaaaatttcacttatttaaatttaaaatttgaatcaatttctaaacggttcggattcgcgcggttctttttttttctatttatttgtaatttatttatttttagatttctatgacggatgtgataaaagaaaggggccaattggatgtaaaatatcgggggaggctttcttttatcagtgatgtaagtggtgtgtgtctgttgtagatgctgtagatgattaacttatcactatacctctatgtagtagtactttatctaaaatacctattatgtacaatacacaaggattaaaagaaaggaaagagctcctttaacttgatatacaaaacaaaaagaaacaaaaacaaaatcggaaacaataggttacattctcggaaatttagagcataagtggggggagttttcggaaaattggtgatattgggttacgtaatatactttttaaataatatcctatttaatactatagaactaaatattactactatcctttggaagaggtgttaatcgtaaatatggtttaatacttctgaattttggaaataatttacttgcttcattatctgaaacagttggtgcaataataacatcatcacctggaacccaatttattggagttgtaatttttctacccattttctcagatgtttgtaatgaatcaataactcttaaaacttctgcagtatttctaccacaacttgcaggatatgtcataattaatctaattttatgacttggatcaataataaaaactgatctaattgttaattgaactcctttatcatcaatatttgttgcatcttgataatcaatcatatcatataagagtgcaattttcctttcaggatctgcaataattgggaatgataatcgactacctgtaatttcatcaatatctttaatccatgctctatgtgaatcactatcattaactgaaagtccaattaatttaacacctcttttagtaaattcaggttcaagtttagcaaatgctcctaattcagttgtacaaactggtgtaaaatcatcaggatgtgaaaataaaatacaccaattttctccaatataatcataaaatgtaacatctcctaatgatgaatctgctgtaaaatttggtgctgttgaacctaatctaagggtaccattttgtggttgtggtattgacattgttgtatgtatgaaaatttattataagattttgttatgaaataatgctttaaaagtttagaaaggacgaaataatattaattattatagtaaacttatataatactaattgtggctaaactttatcactatgaactcccagtaaattaacacttatctctaataattatttctactaagcatccacacattataatttcaacataaaaaagtcatgattttagaaaattttggttagcgagctgccacttttggtaattctcggggattgatttttactaagtggcgggattacgtaattttggtttcttttttttttatttttgtatcgaaactgtttattcaattaaacacgaaaagctatataccatgataagataaaaaaatggggaataagaatgaataaataaataaaaatggttcataaatgtagtaaagaatttttatattgttcatttaaaactctacttgagagactttaaaatatttttttttttaattataattatgatcactgataaaaatataaagtcaattcataatgactgtaaatgttgattaatataatgatctaaaagaaatgaaactaagaataagaataaaatgaaattgatatcaaattagagaaaaacctaaatttaattattttctggtcttaattttctaacttccttaccaactctccagatttccatacctctgatagtttctaattctttttctaattcttctctgtaattagcttgagagttgaaatctaatgatctttgagtttcagaaccatctctaactgaagcatataatttttggaaaactggttttaagttatccttgaaaattgggtaccaatctaaagcacctcttcttgcagtagttgaacatgcatcatacatgtaatccataccatatttaccaactaatggatataatgattgagttgcttcttcaacaggtttcattgaaagcttcagatggggaatgaccattttctcttaaaacttcatattgagcaaggaacataccgtgaataccacccattaaacaacctctttcaccatataaatcagagtaaacttccttttcaaaggtagtttggtaaatgtaaccaggaaccaattgcaacagctaatgcaattgctctttcttctgctttacctgaaacatcattccaaacagcatatgatgagttaatacctctaccttctttgaataaagatctaacagttctacctgaaccctttggagcagcaagaataacatcaacattagttggaggatcgacatgagttaaatccttgaaaactggagagaagccatgagagaagtataaagttttaccttcagtaattaatggtttgaatatctttccaagttgaagattgtgcagcatcagataataagttcataatgatagtaccttttccaattgcttcatcaattgagaataagttctcacctggaacccaaccatcttcgatagcagccttccatgaagcaccaccttctctaacaccaatgataacatttaaaccattatctcttaagtttaaaccttgaccataaccttgagaaccataaccaattaaagccatagtatcgtttttgaaatattcaattaatttttctcttggccaatcagctctttcatgaactaattcttcaacaccagcaaagttaattttctttaaacctctaactgagttaacattagttttagttgcattgattgaagcagcattaattaaagttggtctctttgccatagaggataaagctctagtggaagatcttgatgatcttgcaagtcttgcagcagcgtttctgtacattgttttaagatgtagtttggataaagaaagaagaaagaaataaagcctaaaaaaagaatagaaagaaatgagaaggcagtaatcaatcttgggaatactgggaaattgctttaatttaaatactcgacgtattcacataattaggtgactgaaaaattaagaaatgcttgaaaaattattattactcacaatgaaaaattcaattttccactaaaattactataccggtaccggaccgggacttttttccactctttattcagggcctgaattcttatcacaatgctataatgccttataagaaaggaagtaagtataataagatcatcatcagtagtttgataagtgactcacagctattaattatattgttatcttaaatgcgtcataagagtacactgtgtctacattctcataactaaaagtgaaataataaactcactcattttttgtgagtggaaatgtaaattcactcagcttttgactctgtccactaatattaagggactgtctttttatagaaaaaagatttttattttatattattacgtaatcgtgtcacgtgataggcttaactattaccggcgcgtcgttttgacaccagtacacttttttattaaatttggaaaataatttctttgaggggaatcctagtctactatacgtctacatgatatattttgattacatgcaaattaatataaggaatttctattggattagtgaaattattaagatattaaattttaaataacttctttaattgtacaacaatgtccgtttcattttatagaacattaaagaatatttggcgtaatggtcttttacgttcaggtcgtcaaattgcttatatgaatgatacaaaatcaggtacattagttggtgaagatgattttggaaataaatattatgaaacaactgatgaagatgaaattcatatgagaacaagatggtgtgaatataaagatttttggagatttgatgcttcacattctgaacctggttggcattattggttagcatatggtactgatactccaccaaatgctttaccaaaggatgaaatagcaattagacatatagctccagagaatcatcatgcaattaatcatacttttacaaaaggtgccttttattcccttataatacctgctaaaccaaaattttcaacttgggaatcatctgttactccaagatcttaaatttaataaatttaactgaattaatcgaaattagcaatattctttattattctattattctattattattattaaagataatataataactttatataacgtacatcatattatattattattttcatatatacacaaaaaaaacatataagattacaaagaaacaagcacttttttttcttatttctctgcaaatgttgctgcaacaattaatgggaaaactaatgtaacatcagtataaactttaatacttttagcttctgccttaattttaccccatgaaattgcttcatcaggtcttgcacctgcatctgatgcatcaaattcttgacctgtattaatataaactgcataatctgcaccatttctcattaaacatgcattagcaatatgatgtttaattaatccaccacctaaaattaacatacctgccttatatgcattcattgacattgaattaatttttctaatatcttcaacaatatctaatctaatttgacttggacttgccttaaaagtatggaaaaataacatatcaccaattgaaccatctgttaatgcaggacagaaaactggaatttcattcttatgacaccaatataaaactgatgtttcatcattaatttctttacctaatctatcaataaatttacttggagtccaaaatggtgtacctgcatttaaagcatctgtaccttcctttaagacaaaatcattttgttccttaagcataacatctaataatggaaccatccattcctcaaatttacaataattatcatttggaacaatcatattaccaattctattcatacccttttcacgtaatgcagcacctggagctgcaaaatcactcataaaagttggtgctaaacatttaataatatcttcttcaataccaccagcagttgaaacaattgcatcaatcattttatgttgagctaaaaatcttaaagtatcccttaaacctgatgaaattaaatttgatgtataacccataaaaattgttgtcttttgaaatccattttcatcgaattgtcccttacgttcatgttcttctaattcatcaatatgtttacctctccatgaacgcatttcagttaataatatcacatgcttcagctaatgaacttgcttgacatcccatagttctcataccttcaataatatcttttgctctagcattacgactttcaggttttgaataatcaataccatgaactaataatgatccttctggaactggatcggatgctttaagaacagcatctcctgctaaatttggaacttacacctgacatatttatatttccttatcaaaagattaacccttttaaaagacttgaaaaatcagatcctttaaatttcattatctgaaaactaaaaaaaaatttaatttattgctccactaatttaaaataatattatataggcatattacgtaatgtctaatgatctaagtctataatctacatgcttaacttgataatatcggagtgaattttaataccatctgttcactacgtggaacagtagtgtatatatcaagcatttctccatcataatcataattaaacgtatcatctaaagtaatgttataacgacataataaacttgtaagtataatttttatctctgcagttgctaaatttaatccaatacacattctgctaccagcaccgaaatgcattaaattagccttcattaatttatattgttcatcacttgcatccagccatctatcagggttaaatctatcaggatctggaaataatgttgatactctatgtaaactccatggttgcataacaattgttgtaccacctggtattttacatggtttaacattttcattaccattaaatatcatacccctagatggaacaattcttggttcttgacctggaattgcagcacgtaatctaaatgtctctaataaagttgcatgagtgtatggtaataaatattcatcatcgattaaactataatcaaatggaatgtggtttgaactttcaatcggtttcccattatttaaagtatcaattaattctttttgaattttcttttgaatttttggatttttagctaattcataaaaaaaatatgataatgtcgtacctgttgtaacatgacctgcagctatatgatcaaaaaattcagatttagttctatttttagtgaaaattggacttttttgaatcactttaccgtttaccttatcataatcaaaataaactgttaataaagtttcctcattttgttcaattgtttcatttatattactaaaagcatttaaaaattgattttcaatccatttataacatttattagaggcttcaataactttatcagttgcaacataatcataaaaatatggcatttcagtaacccagaatccggttgatgattgtaatccaaattctttaacaatttgattacctttaacaaaaggatcagctaataatgaatcataattacctttgccgaatgagaatgaagtaactgcatccattgccatattacaaaaaacattaaaaacatcaattgattctttattatattcatcgaaaactttcaaagtatcagtcattacggtaactattttagacattatattttctgaacaaatattagttttggaataaaacttatggctaacttttcttgattgaatatgctgtttcttatcttgagttgagaaagtatttggttcatcataattgacaaattgtgcataaaagctagatttatcaaaattaccaacataaatatctttttgatatttaatatcattaatgtcaacttcattaggaccaattctaacgattgatccgtattgttcgtgtaacttttgaacatatctgtttctttgctcactccaagaaatatataggatataatatttggttaatgcgcatattttaggacctgggatgttagataatggatgaaaatataatgggtatataataaaataaaaaactaacgttgacaatccaaccaataaaattgagtttaattttgattgttcaaactccgatgttgatattagattattaaataattctttgagcattgtagtttagtattcactactgcaagttattatatgtatactgataataaaccaagtttgaaatcgaagaacaagagaacaagagatactgttgaacaatttgatattccttggtcctttcatgagtcaacatgattcactttgataaagagattaatcccaattaagaaactgtaagcgactgcaagttttactactaagaaaataatttcaaaattttcatgacactctgaatttcaagttgatggtttttgaaatttttcaattaaacagttttttgtctttggagtttctttcctggaattaactcactctggtcgccatgttgagatatataaagttcagtttcgttaaatagacaatctatgaaacttagcttactgtcttagcatggcaaccagagtgagtttcctcaatcatttcttcaatgaatatgattgtgcacaatagggtccatgatcgattgtggaattgtataataacaaaaagtttctaatatagtatataaaaaatttaaatataataatattacagaattgtttaatcataattatctgactaaattgtttatctgtctgaatgttttgctgggtatgtaacaggtataccatcccattcatctgcgaatttttgaatgtataactcaaaatatctcagataatgtaatgtaaaatattttggttgatgtaatggaactgataacggtgattttttctctagccaaaataattcatcatctatggcattattttgacatgtaagtctcatcatattctgccactcaatataattatatttgtgattcttatcaagacatagatccagtagtgttttacgcaattccagcattataacttgaattcgacttaatttatccaaaacataatcgttctttttcttgaactttgtctcaactatattatcttcactgattgcgcctacacctaaactgtcactgtcttctcccaaaccatttaatttataaatctcttcaaatttatttacatcaaaattttcatcaagtgatttgaaattttcaattaatacctctcttgatttttcttgttgttcaggatcaattttgactcttttaccttctctaaaataatttgctaattgaactgcagctgtatttgacctaacaaattgttttgaatgtacaaatccataattacctaaactatcaatatctaataaaacagtatataacatatcaactggatgtgaagcaactggaattccaccaactggatcaatatcaaaatagttagagttagattcatgatcaaaaacagatcccgcaaattcagcatgtctacttacatgattcatgccatcaaaatttccatgtgattttgatttttcagttgtttccagagaattatcactttgaacatcattatctactgtaatcattgatttcattcttaattttgaaatcctatctttatcaattgaaataacttcgtttctttgaagaaaatacccaaaatcttttaaatatttattacttaggcaaaattctactaaaacttcaaaagttttaaattcactaatatttgtaattttatagaaaacaaaatcacttgcagttgaaactaaaattgtcataactggaatggcagctaaagcccaaatacagaaaaatgttttgccccctggtgtaacaggattttgacttccttggcctaatgtcataagattgaaaaaacaataataaacacttaacttatatgaccagtcttctaataaggcaaatgtcaatgcaccacacataagtgtaaccatgaaaataaatatagaaacagctaattcagaaataccttgaattgtgaatgcccatttatgaatattttttattagcttaaatgatcctgcattatcaagtttgatctttttatcttccttatgagatttataaaatcgtttccttaatctttcaattctatgccaatacaaagttgaatctgagaaattaaacatcatattcctaatactattaatgatcaaaccaaagatgactaaaccacaaacgatccaaattgatgtcaatgtttgtcccaatgggttagttgtactaacgacgccttggtctccgatggtcacaattgaattaatacaataaaaaaaagaaggtccaagtcttaaatctaagacagcggtgaaaacaccagcaccaatgaccaaccaaccacttaatgctaatgtttgaacaatcaatgtttcttgcgtattatcaatgttgaaaactggtttatattttttcatcaaaaatccaatttcattgacaagcaaaaggaaaaagtttgtgaaatgtaaacagatggtaataatagcaaaccaaaacccttcaccaatgatataattttcattatgtccacttctataaaaccagatatgataaccaattattaaagcagttaataaaacacaagcaatcccccagccataaattgatatcacttgaccttttgtatatctgattttctttctatagtttaaaaataaaaatgtatttgagacaattgcaagtgcacttgaaactgtattgattgagtaacaccatattggatctttttcatattttgggtttattttattaattttccatggacaaataatagccataattgagaaaacatttgataatggaccagagcaactacataataatgggatataagatgaacacaaaaaccaaaataggaaatgtttatcaccaggtttaacatttaaatttgaaatttgccatgatgttttacttgaaaaactattgtagaattcacttaatccactttcttctaattgtgatactggaggtattgtataatctgttgttattcgttttgtatttctgaacttcttaccaaactttgtagtttttctgtataggaaattttcagaatcatctacggttgactttgatcctaacctagattctgaccttgattttgatctatcattgaaaaatgttttataaataggttctggtataacatctggctgtaaatcatctacaatttgacgtattcctcgtgtatcttcatctaccacttcatcagctaaacttttatctatttgcaacttagattgagacaaatgtcgtagtaggttcagcctcttcctgaaatattttgttgttccctggtaactacggttgatatttttccttgaacctattgattttcccatactggaattagaaaagcaaagaaatgttcctaaatgaacctaacggtgacaagtaatgtgtctgttatctgatcactgataattgattcaatgtaatgaaaaaatgatctaatcattcctgagctcgtaaaaagctttaagggcatccacccccctcaggtgatggtaattccgttaaggaccctcaaagaatcaattttctgcaagagttcttctttttggttacatcattttatttttaaataagttgattgattatatacgagttattaacaggcatcttgtatatactcatatttcaatatatatgtttaagtctgtacacacctccattctacgaccttttactcaaagttggaagttaacatttctaagaagatatgccagttccaataatggaactatatctaaatccctagcatcacaaagaaaaaaagttttaacatttcaaaaaagtgaagtttcagaacttgatcctaatgaaaatataaacggtactgaaactattattcatcctgcatttgttacctcttcaaatttggaaacttatcttggacaacgtgtgaaacctgttgttagtgttactaaatgtgaaagctatgattttgataaagttttttcggtattgtcattaaaaggtttagctccagtcaaaatagttcctggtgaatgtattaaatttaactggaatcaaaattgtgtttttattttcaagtttggtactatagttgcttggaatattaatgaaaaggaagttataaacaatatcttaccaatttttaaaaatagtgaaattaccagttatcaatatcaaagtgaagatttagattatatagaaattaataaagatattgatcaagtcaaggatgaaaattttgaaaaaattattaatgaacaaaatgaaattggtttacaaactagtgaatcttacatttccaaagatactgagattatttgcttaaatgtaccaaataaatcacaaaagctgttagatatgttagcattttcatatggtatttcaagatctactagattggctatcttagaagaagcagttgaaacacatatcaatcttacaagatcaactattgaaaaattatcacatggtgaaaaaattgcagttgatccaaaggaaacattgaagttatcaggtagattactacttttacgtggtaagttgaatctttattctgaactagttgaaactccggatatttattggagtgaatcacgtcttgaaaaaattcatgataaggtatcgaatgcattagatatttccaaaagagttaatatcttgaacagaaaactcgactacttatcagaagaagcggatgctcttgttagtattatgtccaaacgtacagaggtcaatcttgaacttatcattatctacttgattgtaattgaagtctgttttgaaacgtatcacttctacgaaagacttggtggcaaatacaacattgaatacttcaaggcattacttaactaatcaattacatacattgtatatagaaacacagtatataacccttaaataaacaatatcaacttattctaatactaaaacctgataataacttaataatttaaaaaccagccgatcagtttttatgctgtttcaggccctcagacaatacaaatttttgagaatttcaatgccctcaaaaatgcatcaagatgatggattagcctttaaagtggacgttgtcattaattacagcccatctcttcttctatttttgtcatgctctacccctatttcctttactaaagcaagcttactttactattaaaggattcctgtttgatctagttgatattttgtaactcaatgcagaatagaaacagaaattcctatttggaaacctcatatacaggggttggtgcattcagttctgcacctgcacctcattcaaatgctttagcagctgcttctgtcattggtaatgctttaaagaaaaataatcataatccaaataatcttgatttacctaaattacaagctccaaaggctccacctaaattgtcaagaacttcatctgtaacttcatcttcaaattatagaaggaattcaactagaaatccatcgattactgaatctagttatatcaatacaattagaacaaactctataaatactgcaagtgctcgtcgtatgtcattaacctacactatcctaaacaaagattacaatcacaaaaaagtgcccctaatttaaaaactagaagatctgtttcagattttacaaatacaaattcaaacaatagactctcatatttaccaagacaaaatatcccaaaaactattaaaaaatatgttccttctgcaaatggtttgatttctgtggaagtcccaaatcctaaacatccggataacatgccacagtcaaaacaaaaagtgaactcattatcaagacaatctgttgggaacggttatattaacaacagattttcttcattgaaagttagtgattcaagagacaattatactagtagacaaacctcaatgggtaataaaaatattaaaagagaaagctagaacacttccaaacggtactaaaattataagtactacagttgaagaatatattacagatccaaacgatgaattttatcctgataatgacaatgataattatgatgaatacatatgatggattcgatgatgctgaagaagttcataattttaatgaacatgatgacgaagaagttgatatgacaatgacactggatgaaattaatgaagaagatgaaaatgcatctgttgaaaaattaccaaatgatcataatgttctagattcaaaagtaattgatgatgagacttatgaaacagaaggaaagagaatcattgaaagtaatgaaaaacttgaatcgcatgaaagagaatctgctttcaaatcagtaaatgaaccaattaaagatacggttattatggaagatttactgagccgtaatctagtacattcgattactccaagtttacatcacctcaacaataaaaatattatctcccctcatttaataggaacccccagctcaggttttatttccgtttctgatatgggagatgaaaaagctaatgaaaatagtgagccatttgttgagaatgatgattacaaagatatagatgatgaagatgatgaaattgatgctcctcttgataacattgtgattgtcaatgaaaataaggaattattagatgaagtagaagatgataatcaagaaagtgattatattgatgatatacctgaatctatggatgaagttggtgaatttgcttcaaatcctccctcagatgtaaaggcttcaaatgagtatagtgaagaagaatatttagcagcgcaagcaaaattggatgaactagttaaacggaaacaacaagaaattcttgattcaatgattaaaaatggtgaagttgatgccaatttagttgatggggaaaacattcatgatcaagttgaaactgaagtagatgaccatattgctgatgtggatgtttatgtcgatggtggcattattgaagatgttcaaataaatgtcaatgataatgatattattgatgaaggtattaatgaaattgatggtcaaaatgatgcagtatcatctgatggcagtgtatatccagactctttgaaagatattgaacttccaatcgagcaatctccaagtaaaaactcctattcatatcaagatgatgcaaaatcaccaaataaaaatatgaattttcatactacctcaaataatgaaatttccactgatgtgccagcagttgaaagctttgaaaaaccattgttttttaatgttgatgaaaataaagctgaggaattctacactccaccggctactcctttgggtgaaaatcaattatttagcaatgctactgaaactagtgtagctgcaactgaaactgaaccagaaatacacaaaactgtgaatgctctttcaatagatgcttcaccggattcttcaattgtccatgactctgttatatcagcaactcaacctttgaagccagcgatctctgttgaaaaaaagtcaatggctcaacacttaagaccaactgttgaacctcttaataaatctgttaattctaccccaatccaggcagctaacagaactgcaaatatctctcaaaatagtacgcttgataatcaacgtgttccaatttcagctataccaagcagtgttcatggtttagacgatgaaagtgaggatgatgagctgaatgaactggatcatttagcagttcctaaaagggagccatcaattcaagcaaaaattgacttagctgaaaaacgtaaaactttagaactaaataatagtgatgtcaatttggctttaggtgaaaataaaagtgttgataatataaccaagagaaaatcagttctgaaaaattctcaagggagtagatcatcattacatctttcacaaaatcaacaaaacaatgcctcaccagcatatctgtccctggcaactgctcaaaataccaaattgaatgctatgaattcagtctcttccaaaaatcaaaatataaacaatttacaagaatcaacttcagtaaggactagatcaagagctggatcagctgcttcgagtattcaaaattctgcccataataataacgtatataccccattggcagctgcatctaaagctgcccaaaggcattcagttcagcaatttggctctaatggttttaataatgatcaattcgataataaaaataaaagaaatttaaatgcaaatccaaagaatggggcaaatgatggtgaatatctgtcaagggtaggtagtgtgaaaagcgcctaatcctaaagttgaggaagctaaaaagagaattttacaaaatagacctggtgcaaaacgttcgaaaagaattattagagttatcaaaaactagaccacatgttaaaaaggatgatttaattgcactgaatgatacatcgtatgttccacgtagatcttcatttgagaaagagcaaagtaaacttggtgctgatcaaaacataggacaaacaaaaatgacatcattatctctaagagatttaaattcttatgtgtacgaaaatcaagatcatacgaagcattctaatcgtggttataagtcaagattcgccgatgataactctgatactgatttaccattacctcctatcaatacaactgttgctccagctacttctaaatttgatgaatcttcacatattcctgctgaacctttaaacaacgaaaaaactagatcaaatggatttaagtttaagttcggtggtataaatagaaaaaagtcaaaatctgacattgttgttaataataaccaaaattttgcaactccgtcagtaaatcaaaatgttgaaaaaacttcacctagaaaaccgtcaggcctgtcatctctaaaaactcaccttcatagtaacaataatagtaatgatgcgtccaatggtgtcaatgatagtcataaggaatctaagttccagaaattctttgttgatcagcatggaccacgtactcatagaaatgttagtacagcatctcacgctactacaaattcacaagctactgaatctaaaaagaaaagaggatttttcaagaaaatgttcagtgatgaaaaataggaatccaataaagttttgcattttattgttcgtattacagtatagttaattatttatgtattgttttataattatgttttttacctataaattaattcaaaaacttttcataaaaagtgaatcacttaagattaagctcgttcatgtcatctgctaaacgtttctcattatcagcaggtacgaagttaccaaactcgtcatcttcgtcatcttcgtcatcttcgtcatctttattctcttcttcttctggttcactttcattattaccaagtaaaccaacttcttcattgttgactaacaaattatctatatcatgatcctcgaaattatctcctaatgcacctgactctaatgtccatccagtcatcacactttccgctcctttactatcaatactagttctattgataccattacctttagtttcagattgagcgaatgaacttgctcctgactcagagctagcagcagtatctgctcttattctggaatcgcccatcttcttcttcacttgtgaagcaactcttacaccatctgccataacattattgaccattcctctaatattacctaccattccaccaaaaacagaatcagtgatatttccaggtgaatcaagatcaaaagatttccagaattgattttcaaaaaatgatgagtatgtttcatttgctaaaataaccattcggaacatagatggggtaatataaactgggtgtgttggatcaagtgctttattgtgagtaatgctttcttttcgcttgtcattcaaatctccatcatcatcatccaaattaatcagattttcatctggattttcatagggttgagcatatttgaatgcaagttgtaaaaatgatgagcttgctgaaaggtatctgacactttgtttggttttccatttatcctcgtcaaatttcacttcatctggcaggctaatttcttcggtttcacttacctcaacacctttttcaattaaattttttcttctttggacaatcctttcggcaatttgatcttctaattctctgttggcaattgtatcaaatattttaccatcacgccatggagttgtaataaatattaaatcttcagcaacttcgagtactgtttctttattaattcttcccgtattttctgtatcatataatgaaaaatagttagataaagcattcatcaaatcacggttaacaatcttattgacaccaacaactaaagattctaagctcatctcaccattttcatttgaccagtttttatataatctcttcaaaaatgatgattgatcttttgtttctctttccatatttacccaaggtacaatctctgacatgaatttttcaaatgagttgaaatccatggtcagattaccacgatttggtgaatttgagtcctgaattagaattctatagtatctgtcatatatattagatatttgttctttgttaagatgtggggtatctggtaaatttctaatctctgctcttttcacaaataaatctatacctttgaacacttcgtttttaaatgtgtttctatattttataatcatacgatcatcaatcatttgaaaatcgttgaatgcaatttcccataatatatcaaactttctttttattttatgatcctcaggtgtaatttcatcaagacttgcaaaaaaatttttgaaaacggcaatacattcaccatcatctgtacattctaataattcctgtgaattaattttgacaattgccagcgcaactttaaacaaagtttttggaccgtttgcaaaaaatgagtccataactctgaaagcaaaaactagaggcattgtgttgagaaaaaatgataaaaaccatggcaatgaaacgatagaaagttgaatatcatacttattgaagtgatctgctaaaagtggtaaagtcttctgaaccatgccttcaaaaactttttgatctagtaaaacaccgtacattgttttggaatagtaacctggtataatcttatcacataacacattcaaagtccagaaagcctgatcttctgtcatgaaaattaataaagctgcggtcacaatattcatagcttgacaatatccaatatctggattcttccatgaatatgcagttaaaactcttcttaatttatctattccttcatctgtttggaaagcagagtattcaggtaatgatctatttaaatctttttctatttcctcaattgccagtgtatgtttgcccttattttcttctaatagattttcatattcttctgcattttgatacctgtaataaattgatccggaagatgtttcccatatctcacctctcaatctatttgggatacctaccaggagtaaactgttaaatatatggttctgaaccaattcgaggtttctaccgtacctacggaaatactcaaaccatcttttcaactttaatatctctttttctctactttcatttcctggaaatttatactttagacccaaacctccctgaggatgttgaggtatatcaatgtgtttttcacctaattttgagttcttgcaatttttactgattaagtactcagaataaagggttctttggaagctttctaattttacactgtcttctttatttaaattgtgttgtttgttaaatgtgtgccagaaatgttcagctttcgaccttattgtatcacacgtgatatctaaaatcattccatttgttgttgaaactcttacgtgtaaagtttctgcgtttggtaatttttgtactttattgattgatgttaaatgaaaaacaatcttgtcttctgtgctatcattttgtttgataagtagataattctgtgttaatgtcaattttcctggtctccgtgaattgatattgtgaggtacaggtaagtaagttcctgcacttttgatactatcactgaaactatatagcaccctgcttgttattatgtaatctacgttgatttcacctaatattttttcatctgaaggtacatgaaagaacccttgcataagctggtcaggagttaagtggttaggattatttattgactcaattgcattttgtgctaatgaagcaacacttttaaaaaaatccatggtattttcttgtcaatattaaactgtttattcttttagtaggtctgtttattacaatctatatggtctttaatatattacagttgctgtgtgtgcccttgtagaaactaatttttttcacattgtataattgacagtgaacaataaacatgcggaaacttcatttttacctgatgacacctttgggtggcgcagtttttctgcctgaattggcgcagttttgcaatgtatctggaagacttttctttaatgagggtaaattttaaaaatagaatcgaattgttatataatatacaaataaataagtagataataaaaaaaagggtataatggctaaaaaatacaacataatcattattcacttgcttcatcttcctcaacaacattttctagagattgaaatatactggtatcatcaactgcattcaggtgctcaccattttttataatttcagtaagagtattctgtcttggtaccttcaaatatgatttcaggctgaacttgtggacctaataaatcactatcgtgaaaatttcgtggatttttttgatgtgaatgactatgaacttcagttatgtgtgggtttgaatctcctgaactactctttgatcgattcttgaacttcataatagggtttattgatggattggaggatgctcctttagatgacttgcccactttgagagtactcttaattaaattatgggtgttcctcaacacatagaatattaatttacttttaaccaatgcaaagaactcttcatttgacatgaagtctattcgaaacatctattttcggaatcacaagatggaaatcagtcaaattaacaaagctatatttaccagtaccattgaatgtcaaacgtatatctattgaatttatcaatatatggttagccagataatatttagaagacctttcttccattattttaaccttactcgttgtacagtttaatggttttgtagactttgaagttcgctaagcctgataattgagttgatttatcgccaatagatgatgttgaagattttgatgaaagagggggttctggttgaagttgaattttgacttggaggtgaaagtctagattgttttttgtgcataaatttctgtaatacctttgatactttggatggtgatttttcggttgaatgagatgaggaggctgacagttcggaactaaaactatttcttctactattcattgaagagtttgattgaatggagtaaatattttcaaagaatgcatcagagtcatctgtatcatatgattcagcccctgacagtatttgactttttgggtatagtattttttcaagtttatcagcaaatctcatatcaaactcaaccttcagtggagcaaatgttaattctttatcggttacaacacgaatgccaccaactggcggagctaaagtccagtctcctctaaataatggctgatcggaatcttgaagtctaacaacaactgtttcatgaattgccttgggatgtttgtcaaatattgcaaaatcatagacatatgcagtattgactgattcgccattttgagattgtgtaaacatgtaatatgaatcaattgcattaacttctgtgaatggtaggttattctcatcgtaaataactaacttaatagttgatgccatgatattccattgtgaaaatttatgagaatcattatactttttgttctttgaagtttgtaaaatatcaacaatagcattcaaacttaaaaaatactttttcaagttcaatattagcatctagtatgtcatcatcgatattcagaccttctgaaatattagcattcaccatcaatcttctgcattctgacaaacttcttgcttgtctttgtaattcaaccaaatcttcataaagatcatcaaagtttgaaagatcagaatatttcacatagtccttaactgcctttttcatcttttgaatttctgtttcttcattttcaaaaaatgaatttgcaatttcataaagagtttcatattgttcactgtttatcatcacactgaaatctggagctattactctaatagtttcctttgataatgacgggatattatcctcgtcttctgaaaaatgtaaagagtttggtttgacatacaaaagagcacatgacaaatcttgaataacaacacattcatccagagagccaggtgtgtaatacatttcaataggaagttttggaggccaacatactgatttcggtgaaaaaagtcttaatttgtttgttaaaatattctccctatccataacataaacgaaagcatcagttaatatcaacccacttcttgattccattggtaatgataattgaaggccatctgattcattattataattgtcactgtgtcccttcacatcaagatttctcaaaacgatttgattacttgttaaaagtgtacaagttttattattggtagtaactgcaatttgaggtaaaatcaatttaatcagatatgaatcatcagtttcagcatttttgtaattacttgtgttatgtaactcttgatcaaaatcgtctaacatcagtttggatttctcaaattcaataattggatcactctttaaaaatgaaaggtcgggagtgtcatctgaatgttcaatagattttctcaattgttcagccagattcgaagcttgttgactcattgaaaaaacaacaaattttctgtctttgatagtttcaagatatcttaaaacacccatttttgtgtttttagtccacttgatattaatggtataaatactgaacctgtttctatagtttgaggtatgaataggagcagatgatatttttgattttgctttggaaataaatgaagaatttcttgatgaaactcttgttaaatttttcgataattcgtaaataatttcatcgcctgattcagcatcatcatcaatgaattcatcgtattctgggaatataccttcaccaaacttgtctttgagacatctcaaaatatgtaacctatggtgtaattcttgtaattcattccttaagttgctcaatgtcttattaataaattcatttggtggtttagattcaaaatctttaatttctgcattgtggaaatcaataatatcagtaatctcagcaatccttccttccactaatgaggctggagctgctgcaaaattccttttgtctaattcacatctatgagtaggtactttcaattgtatcaaatggataatccagttcagcggatggtgtctctctaacataataaaatctgggtgatgaagcaaattcaagtgccttccattttggttcttctttgggtattgcttgagtctcaagttcaatgaaatcattatgatcataccaattcctatccattgattcttcactaaatgatgaggatgaatctgactcactaaatgatgtagttgaagctctgtcgagtccgagcttttgaacaaggattccggcagcagatgcttggttgaaaatagcactcaatattctcaagtcggcatcaataaaatcaataacccctttgtccattttcaaatgagattctttgttagttgagtctgttttcttatcataaacaagaacttcttttctagtttgatgtaaatccatagtgaatgatttaacaaaacattttaacccagtaaatgcaattctactaacaccacgaccagctgacgaatgttgataaacatgtgaaagataaagaggagataaatcaacactataacttaatccaaaaatactagacccaaacttaggtgattttttatcacttaaaaattcatttttaaacatttttccttcttttattggtaaccctaaactggttttaaaactgctccaccagaaaaaaaagtacagcattgcttgtggcgtcaaatgtaatgaattgcaagatgtgcctggaggagcatgaggtaaattggcacatttgttatcatctcttgaatatactgaaagcgctaagtaaatgtaactacttctccaaccttcgtaggagtcccagccagctttttcctcttcactaaaaaatgtatctggattcctcaatgagacatcataatgtggtctaaacttgtttgtacgctcaacttcacccatattagcttttggatcaccatttacatttctttcaaaggcacatccaagtttccaaatgacaggtttactatctaatctaagtaaaactttagcaatctgataatcatttgcactagcaacaccattagtaagcatattaggcaacagataaaggatcaaatactggtacacctatttcaaaaacttcactttcaacaatcaaaaaatcttcaggtttacctgttttgttgattgactaaagtagcattactatcccatttaaatgcaaaacctgcatttctaccaattaagtgataaggagattgacttgatttgataaataatgaaattcccttcttaaaatgaaatgtgaaactttgatggaactaataatggcattttatcccagaatccaatttttggtgatatatcaagtggtggcttggataaaagatcaaaactattgaatgcataacttataccacactgaagtgaaggtgcccaagaaacacgagcttctcttgaagaatcgatattaaaggtcatatctgtaataaatttaacatttgtcattgttctaccaatatgaaatgcatataaactatcttttttccttggatcactatattgtggaacacatggaacaaaattgtaacggatttcttcttcagcatatgcttgttcacaaatcaccagatcaccatcaaccattacagtttgaggtccagtcatctttattaccaccaaatccaatcaaaggtaatggaaaatctttgatttgtactcttaattcactacatgataactttcagattcaatggaaataaaataccatatctcatatctttaggcattccaccaccaactctatgcaaatattcagcataattttcaagtccaaattctggttcattaagatctaaaacagcatctaaaactttaaagcaaaacaatggttgtaagtttccttccattacaactggaaatttctttaaaaactccttacgaattctaggatctgctttgttgtaaccagtgaatacttttatcattattcttagattcttcggatgttttaactcttcttatccatgatttacttatattggcataaagtttatttcttggtatctcaattgcagtgtggtattcacgttgatagtttagccatgcatcacattcatcaggtaaagctagtttggaaagtctggagggaatattgctactaattgtattattggcttgtctattcatatttacttgctgggagtttatatcctgtagaaaaagattttttcatttcagctgaagttccattggggataaaatcacttgacttatgattaattgattcaggcataattgcagtatcaccatcaaatttcaaggaatttgaatatttctccttcaataacttaagtatattcttttcatatttggaaaaatctgccagtttggctaatctcatatgttgttcaacttcagaaagtaaaataattcttgttaattcttcttcaaatggatcatcatggttgcaatataaaatccttctacttctaattttaatttttggtaatctaggtggactctttacaatactaggtttaataacatcaactttaaagtctttttgatcctcttctatgaacatgatatctctgaagtttaatctaagctttttaatggatttaaagaaagctttcaaattatcaaatgttttataaaacacatattgatatggaatttcaattcttatatcatctgtatcaactaaaaatcttgtttcatcttttccaacttcttccttaggtaaaattttaacatttgcctttgaaattataacaacaagagtccaaaaatcatcaatttgaggattttgaccatatattctaatagctttaaatctaacatgttgatttctattagctgatggtaatttggcatatcttaaagaatccaattctaatgctacatcgacattagatggcagtttaaatttaatcatcaacaatcctaatatggcgagaatattcaatggacgagaaggtttcttcttagtgctttctctctttattgatagcaaccggatatctacccttgagcgctttaaatactgtctcaacaaagaaaagtgtccataagacttcaactgacagtgtaatatcaataaccggcataacacatgataatctatgatttaagtaggtatacttactgttgaatttggataaattgaggatgttagtgaaatctcttttctgtttttcattatcataatctcttataagtgaaatattgaaatcaagtaactttatatttgagattggtatatcaacagtattgtcatgaacatatatcaattgtttgaaaactatacaaacaccacgcttgtatgcattcaatggagtttgatcttcaccatcccaatatttaacagggttagtaaaacatacagttaatgtaattttatgaattgtaaatttcacattatgaattatacgtgtgatatatgatgcgtcaccgggtaattgttcttcatttgaattcatgatttcagtatctattgtttgatcgataatttcaactttttgatcaatttcagcttgtgtttgcaaatgatgtttatcaattatatcttggaaaataattgataatttcttaaataaatcaatattttcagctaaaaactcgatatgatgaattgtagatttcacatcttcaataaccacacaatcaccattcaacaaacctgaacctgataattccagtaaatctaaaactaacattctatgatgttcaaaaccatcaataattgaaaattgaacatttctcacagcagaaaacagagatttggcagagattgattgtgaactttcttcaaataaagatgtaacattaccggtcagggaagaatcgactaaaatatcatcaatcagtagatggcagcatgtattatcattcaatgaaacttggaaaactgtggttaatgactgtaatcttaaacgtactttacgtgataatctcaataagttttcaataatttcagtttcaactgataatcaaagatgtttcaggttttttatcaatttggttaccatttgtaacaacatcaagtttcttattcagtttcttttcacgtttaattttcttgaacaataaaatatcatcgatatgagtaaacccggatgaattagtaatggtgatgaaatttcttgctatgaaatgatcatcattaagtaaagttttcattacttcagtattattcatgtgttctaagctatgtaccattaaaggtatatcccaaataccaacaaaattaaaaaattctatttgatatctagatgatttgaaaatatctgagctaatgtttaatccagaaacgttcaaagtaactttataaagattattattttcatgattgatatgttcatcattcttatccattgaatgaagtgagaaaaccgtgtttttgacatgtgatttaacattattgattttaaattcagcttcatcaaaagcaaaatataactcaaattgatcaaaattttcaataatttgtttaattttatcctttgaacaagattcaacagtgttatcattaaaggtagatttatgaattttatcttgatttttacttttagtttcagtttttggaggtaatagttcattcattaattttttaaatttggtaatatctaaattgattccatgaccaacacatgtggaaactatctttgaaaaatgtgcagggcataatttttccaatgaattttgagcaataaaagtccatttaagatctttaataagtttttcatgattatcgtgtagatttgataaattaatatgaattgaatttttcaaatctcttgttttatttatactattagtttgtaaatcacaattcagcgataatgacatagtttccaaatgaagtgaagattttttattagttattgaaaaatcatgtaagacaacagtaattggtaatatccatctagcatactttaaagttttcaagagtttttcagctgcttgtgattgaatatttgcataattactattagtagagaatgattcagatgattttgatgattttgatgattttggtgaagaagtggaatttatgttatcaactgattcgctatctgctataatattattactcttagatgtatctatttgtaacttataaatatgaatgacaatcaaaccatcatggtgagtagcttgaagttttttcctgtgtaaataataaattggacgaatttgaatatcaattgacctaattgaaatattaaattttgataaattaatcttgacattaatgaaatgcaaccaagatatgaagccaatagatactttacctcttgataaccaatgaattaacacataaagtaaaagataagcaagtacgatgtatttaatgtactgcaacattgagtttatggtaataataggtcaataaagagtgttttgttgtaacaattaagagatataaaagttgattataaaagaaatcaatggtgtatataatggtagtctcggaagtaaaatttattatacaatcagaaaataagcattaatttttcatgagggccgatgagtttatgcataattattgaaggttatcaaattattagagcggatgtacggtatatattgagtgaatatgtgttgttatactggatgtggctaatgatacagatggatatatgtattatagtaatggatattatatataatgtacttaaaaagagtgaaaaaagtttggttgattgatttaatcattgaggataccactctctacgagattattatgtagaattgtttctctgacaacggcaaatgctagacgtatattatttgtatcagttgcttgtgaaacatatggaaccatatttaaattggctctattaagttgtttgaatctccaaagtatatatttaacagctttattgacattatcaccacctacataatcagggaaataattttcaagtggagaattagccaatttatcaataaatatatcaattttatttaaacaaagtatcactgcagttttcttaaaccacattgaattaacaacagattcaaataaatttaaggattcctcaagtctatttttatttggagattctaataatgtttgatcatattcacttaatgagacacaaaatattatagctgtaacattatcaaaacaatgaatccatttttttctttcagaacgttgaccaccaacatcaaataaatgaacatccaaatcttccatttggaattttgtatcaaaaatacctgaagtttgctttcttgtacgtaaaatatctgtaacagtaggtaaataatcagattcctttatacgattaagattttcaaaaaaataagatgcagaatctaatatataaaaatcatattttgaattattcaataaatttttcactgtctcatcagttattagttgttcaattaaatttgaaacttttgaatcaaatggtagattaaaattttcctcatctagaggtacttgataatttaataagaattccaattcttcacttgataaatttgtcacttctgacgatatattatattgatttagtgcctttacaagacattgagcagattctaccacattttggaaaacaaaaggtttatattccaatctttcattttcagagaatccatgttgatgaattatttttatttgtcttaatattgttgatttaccagattcccctgaacccaataataaaatttttgcatgtttcttaggttttacaattgatattgcaccaccaccattattattattattatttttaccctttgttgaatttctatcaatctctttactcagtttctcagaagctgtataatttgtacttgtattatcagtggtaatatcatgtgtgttgttgttagtagtattagtgttcttattagtattattattagtagtagtattagtagtattattattatttaaagaattatcaccagccacaacctctagtcccggatgagtttccttagtgggtcctcccttggaccctgatgttttacccttagaattaggttgcccagagtgctctttcaccacagtagagtccttagagccgcatattcccattgtaaagagcttattatatataaagagagctgtattttaatagtaattaagaaggaacgggtcttaaacagaggcatacatacataaatacaaactattaataactcgccaagatgaatggaaaagcgaatatatgcgaaatggagacaaaaagacgatgttacgtaatcatattctggtgtctcgtttctttttattaatgtgatcttttctgttttatcttattttattttattattttattattttatatagtatttatattttatataaatagagtttattttaattaattagttatagtctatacttgcttaccaccaatgaactcactccatcttcttgcttcacttggaataacaacagagtctttctttaagtctgcaagtctttctggtaatttttctttcaaacattctgcaaataacattgcagtttgtggttcattaaataatggaataccaaaatcaattgcatttcttctcatcacataatcttcatcttcaagactttcagctcttgcagctgctaaattaacaacggttttaatatcgtacttttggaaaacttctcttaattctctcttattggtctttgggaattcaattatttcaattgtggaattcttagcaaattttttcaaatattctgcaacttcctctgatgcagtataatatttatatccaatattatctaatcttgatgcaacagtacctaaatattctttacttaaatcacctccaaataatatacctgatggtggtaaaactaaattaaaattcattgttgcttggattgttgtccaatatgcttcaatcaaatctttaccaaaacatgcgatttcaccagttgatgacatttcaacacctaaaaatggatctgcacctgctaatcttgtaaatgaaaattgtggtaccttagtagcaacataattatattctttattcattaaatcaattggttctaatgttgaatcctttaataatgctcttgctgcaacttcgataaaattaatacctaatactttagaaacaaatgggaatgatcttgatgctctaatattacattcaataacttttaaatcaggaataccagtttccttattatctgccttaataatttgcatattaaatggacctgtaattttccatgctgatgcaactttatctgcaatttcctttaatctattcataatttctttatcaagattttgtggtggtaaaactaatgttgcatcacctgaatgaatacctgcattttcaacatgttcagaaattgcatgaacaataactttaccgttacttgcaactgcatcaatatcaatttcttgtgcaccttcaataaatttagaaataacaactggatgttcctttgaaacatttgctgcattaagtaatttactttctaattctttttctgatctaataactgacattgctgcacctgataaaacatatgatggtctaactaaaactggataaccaacttcatttgcaaaaatttctgcatccttaattgatgttaattctttccattttggttgatcgacattaattgaatctaaaattgatgaaaatttatgtctatcttctgccttatcaatatcttctggattagtacctaaaatatttgcaccattattttgtaattttaatgcaatattttgtggtaattgaccaccaactgaaacaacaacaccttctgaattttctaattcataaatatccatagttctttcaaatgataattcttcaaaatataatctatcaacttcatcaaaatcagttgaaacagtttctggattataattaatcataacagttttcttattattctttcttaatgctcttgcagttgaaacagcacaccaatcaaattcaactgatgaaccaattctataaacaccagaacctaaaaccataataccttcatcattaaattcaacatcatgagaacttgcattatatgtagtatataaatagttagttgatgcagggaactctgctgctaatgtatcaattcttttaacaaatggggtaatattataactctttcttaatgctctaattgataattcatcagatttaactgcaattgcaatttgtttatcagagaaacctaattgttttgcctttaaaataacttcacttgtaagactttcaattgaaccaattgattctaatttcttttgcatattaacaatattcattaatttatgtaagaaccatttatcaattttagataattcatgaactttatcaactgaataaccttcatgtaataaagcttgaccaacagctaaccatcttctatcagttggatttgataaaacatcatctaaattatcaaattgatcaccttggaaaccaacaaatgatggatcaacttgtctaattgccttttggaatgattcttcaaaatttctaccaattgccataacttcaccaacagatttcattgcagatccaatatctcttttaacatgttgaaatttagctaaatcccatcttggaattttagtaaccatataatctaatgaaggttcaaaatttgctgatgttgatttagtaacaggatttggtaattgaggtaatgtataacctaaaccaattttagcagcagtataagctaatggataaccagttgccttagaagctaaagctgaagatcttgataatcttgcattaacttcaataactctataatctaaaccatcaggttgtaaagcatattgaacattacattcaccaacaacacctaaatgtctaataattttaattgcagcagatcttaacatatgatattcttcatcagataaagtttgagatggtgcaacaacaattgaatcacctgtatggatacctaatggatcaaaattttccatattacaaactgtaatacagttatcacatctatctctaacaacttcatattcaacttctttccaaccttttaatgatttttcaactaaaatttgtggagataatgataatgattgtgatgataaatttcttaattcttcttcattatttgcaaaacctgaacctaaaccacctaatgcataagctgatctaacaataattggataaccgacttcagaagctgcctttaatgcatcatcaactgtattaacagcaattgattcagcaattggaatattaatttcatttaatgcttcagcaaataattctctatcttctgaggtttctaaagttttaattggagtacctaaaactttaataccatatttttctaaaatacctaatttttctaatttaacaccaacattaagagcagtttgaccaccaaaagtaagtaaaataccatctggtttctcacgttcaataatataagtaatatattcaggtgtaactggtaaataataaatttcatcagctaatgcatgagatgtttgattagttgcaatatttggattaattaaaatagattttttattttcttctcttaaagctttaattgcttgagaacctgaataatcaaattcaccagcttgaccaatggataaaccaccagatccaataactaaaactttattaacatcaactaaatgaataccattatcatcagtaaatcttttcattatgttaccaccttcatattgacttgttgaataaaatttaacatttctattatttattaagtttttagttagttgtctaactgttgaaagtctaaaaagttttgaaacagccatatttattaatgtacttctttttatgatctatctctattttttgaaaaaaataattaaaataataagaaatctttacttattataaaaactatatgtgaatattaataattcgactaacagcgactgatggagaaggaaagtaaagcaaaagttagaagattttaaagagctaagacgaaaagaagaaaggttatgaaggagatattaaattgcaaaatttttcactttcttccatcataattaatagaaaactcaacttcgataatcaacattttttggtgagtcagtgaaaataaattaaaaatccgcggtttccgctcttacctttttaggaaggagttactataataggtaatttccgagcgcgcttaatttttcatctatttatgcactatcggtgatgcaattttgacaggattaccgttattattctagttttttgattagtgtataagcttttttgttaatgggaaattatctaatctaaacaattataggcattaagtatatcggggtataagtatcggagtatattatattgtgtttaaaaattagtctctcttccatctaacatgaaatgcatctcttgcataatagataccacctaaggctaaattagtattccattgatcaacccatgaacaaagagcactacataatgcaatctctcttggaattttagtttcatcaacaattaagttaaaaccaaaattacctgctggaacaactctaccaactctttctctaacttcagattctttttcaccaacatttttaactctttctaaaaattttccctctgttgtccattggaaaatattaccatcagaaagttggaacattctataagaatctaatgcatcaactttatgattaattgtatgccaacctaattcagcagctggtgcattaggtgatctaattaataaaacattagctcttaaaccagctctacaagttgcaacaggttcatcttcattatttggacctgttgatctaatttgatttgaatacattttatatgctccttttacagctcttgatctactaaaccaaaagattgaatctttttgagatgttggacccattggtgatgaattttctgcttttgtatcataaacatcccaaatttttgatcctgtaccaaatctttttctatatgcatactcagaacatttagattcatccaaatcaatataatgaggaatatatctacttgaacgacgatgtggtgataaaaggatagatttagcaagaatcaatggtctcataacaggtctcattaaaagttcaacaggcattttgtttgaattattaagtttttatatttaaaggttaaagtactttttaaaaggttacgatagcaaaggcaattaaaatagctgctgcttggataagtaagatgaataacagtaaatgtaatttcaagaagaagaaatagatgaaagaaggtatattaaacaaggtaatagcaagagttgcccttcactattataagtagagactgatttgatctgattttaaacggggagagaacccagccaccagcgaatatttttatttttcctattttatatttttttccatttctcttatgtagttattttaaatataataggtattgttgcagattaatgtttcttttatcttggttttgttttgtttgaatagattaaactacactcttttgcttaaatatagatacatcacacattcataaacagtaaggtaaaatggctgatgttacaggacaggccaatgatacatttaataagtcaaagttaggagatatcacagaattacaagattattatgatgcattaaatgaactggagaaacaaaataaacatctgcatgcatttgatactggagtggtggactctaatggtaatgatcttcaatctggtatagatagatggccaacactttttgaaattttaaacaaaaaaactcaatcaccactcgatctttggtctttctatgttttcatgagagatgaacaaaatgctattgattatctggatttctggattgatactgttcaacatattaacttatgtaaagcatatgttaaaactttaagagattctctggctgctaattcaagaatacgacaagctgaaagagtaacggatgttttaaataataatactaaagatattaataatgaaactagtaataaccctaatgaaactaaaatttcaattgttgatgatataaagccaccgcatacaagctttagtatggataatcttgataatattgtcagtggtggtagaaataatcatcctaatagaaattcacagaacagtagcagaaattcaagatcttcatcacaattgttagatctcttaatgaaaaatgatatgtttgaaagtgaagaccctcatagattatctttgtttttaagaggtgaaactgctattagaacaagtgatccgttagttaatgctaaacttgatgaattgaaaagaagatcgcaaagttttattaacacaagtggaaataacttcaataataataatgatacagctcctactataataaatgatttcagttcagaacaagatttaaccgatttaaataataaaactaatttaagaacatcaagaatcaatcctgaaatggtggaaacatttattcaatatgacattgatgcaaagcaaagagattttaataagtcacatctgataggtagatcagaattaagaaaatctacaaacagtatattaactacttattttctagacaattcagaaaagaaaatacagttacctccgtctatagttgaaaaggttaaatatgcattagaaactgaaggtagagatgatcctgaagtttttgatgaagcaagagaatttgtttttaaatcaatggaatttgatgcatatccaaatttcttaagaaatcatgcattgaaaaatgttacaagaaaatctgcaatgataaggttattattatctatgatatgtgcactgggtgcattttgggcgggttatacattaatatttatggattatgaacctaaaccgactagagcggtcgttgttataccatttttcttcatgtcatacttgttcttttcttcattttatagaattgatcctttcctcgtttttgctggttatggtgaaagtattgcaacacatggtggtcttatacaattacgtgaaaaatatgttagaagtattttacaaaaaagatcaatatttgtattgactatactgtgtttattagctgctgcttttagtataatatttgcacttgttcctggtcacaggcttcaacattcatgatttttatcttttctactgctttataaacatttacctcttatttactgctctttaatcacacacctatattagcactattgtcatagacataccaccttacataatcaaagcaaccaattttccgcggaaagttcttgttttttgttaccaacaacgacaacatgaatttgagttaagttgacgaaactgcaaagactacttttcttttcccttttcgtttgtagaacaagctgtaactacgcatacacagctatataataacctattgaatgcgtggtggccatctaaacggtaaatactctcctgctagaggtggtagatcttttagaggtaatagaaacagtggatactatcaagaaccatattatagctcatcaccaagaggtggtggacgagctggtagttataatgtatctagttggcctagtcgtggaggtagaggagggggtacaactagtggttaccatagtagtcctgtatcatatcctcatatatcatcagaacctccatcttcagctgtaaataacaataatcttagccatattaataatgctggtcataacatttcacataataatgaaataaatacatcagtagaaagtgtggtgattaatgaatacaatacatctggtgctatgggtgaaaataatggaagttttgcatcaaatagaagtgaatcatattataacaatcataatagtactactagtaaccatatagataatggttatggaagaggtggatttggatcatcaagatttgtatcacgaggacgtggaaggggtcgtggtagaggaggtttatggaatagctctggtggtttaggacgagagagtcattattatcaatcaggtggtaatgctaataatggatattatcataacgaacagaatgtcggtaatgaatctacaatatctaatacttcttattatggacagcatatttatgagggatataatggatcaccaaatggaggtggttacccaaacttatcactgaaaaataacccttcatactaatgttccaacaaccaatactgctgaagtatcaaataataatactaataatatagaagataaggccaaaattgaagaggaagaaaggaggaggaaagaagatgagaaggccaaacaggaacgtcaacgtcaaagagaaattgaatttcgtgaaaaacattgggttggtagaattcaagcaaagggagatattaaaaattcattagttaaacgatttgatgaactggatgaaattaactcaaacttgttagatattgattcaaggaaatttgggttagaaattgaaattaatagacttgcacggattttaaaagctgaggaagatcgtgtacgaattgctgaagaaaaacttgaagctttggatctatcacttgatgtgtaacttgcgtctctgatacgcgtgtataatatgctacattcttgtaataataataataaatttatgataataataaagtaataatgtaaatgtagtccttatagattagaccgaaacctcgggataattatttattgaattttagacattgcgtgccgacagttttattctccattttttaatataatctccgttttaatgctttattataactcattcctttcaacaaataaataataatgtcattagttagtaagatctgtaattgtgaatgcagtttaaccaatgcatttctttggactgcattagctgttggtattattaaagttactagatcagctttatcatttttcacaattattttagaatcttatattttacctggtgttaattttgcaaaatatggtgcaaataagggtaattgggcagttattacaggtgcatctgatggtattggtaaagaatatgcatttcaacttgcaaagaaaggttttaatattgttttagtatcaagaactcaatctaaattagaaattgttgctaaagaaattgaaaccaaattcaagaaagaaactaaaataattgcatttgatgcatcaactgatgcacctgaaaactatgaattattatctaaatcattacaaggattacctgttactattttaattaataatgttggtcaatcacattcaattcctgtctcattccttgatacaacagatgaggaaatgtcacaaattattacattaaataacattgttacattaaaggttactaaagttgttgcgccaattattgaatcaacaattggtgataagaaaaaagttcatggtttaattttaacaatgggatcgtttgcaggtcttgttccaactccatatttaggtgtttattcaggttctaaagcatttttacaaaattggtccgcatcccttgcaggtgaattaaagtcaaagaatattgatgttgaattagttatctcatacttagttgcatctgcaatgtctaaaattaagagatcatcatttactattccaaatcctaaacaatttgttagtgcaactttaaagaatgttggtagacgtgttggtgcacaagagagatttgctacaattacaccatacccatcacatgcattaatgcattggggtatagaatcatttattggtgtttattctaaaattgttaataaaattaatcttgatatgcataaaagtatcagaattagagctttaaagagagctgcacgtttagaagcggaaaagaagcaattgtagtttaagtttattttacaaataattctaactatatattataatacaatttattgattgatatatcctatacttgtagatctatcgtatatattccataaatatacacgtaaaacaccaagctattaagagaacacgcaaatttcggaaatttcaaattttcctcatggagaaaaaaacgtttgttttcttttcatttcacaagtgttctaagtgaattgttaaaagaatcaacaggggtagatatagagagcatctcttattggttttatactcttctccctttgtttctgttatcaaataacgtgtattttatagatagtgtggaacaatatggaggttaatgattttgatagacttgaaaaaattggtgaaggtacctatggtgtcgtttacaaggcaattgacaccaaacataacaacagaactgttgcattaaagaaaattagactagaatctgaggatgaaggtatcccatcaactacaattagagaaatctcgttacttaaagaattaagagataataatatcgttgcattattcgatattgttcattcaagttcaaataaaatttatcttgtctttgaatatcttgatatggatttgaaaaaatatatggaatcaatacctgaaggtcaaggtatgaataaaaatatggttaaaaaatttatggttcaattagttaaaggtatctattattgtcattcgcatagagttttacatagagatttaaaaccacaaaatttattaattgataaagaaggtagtttaaaagttgcagatttcggtttagctagagcctttggtgttccattaagagcatatactcatgaagttgtcactctatggtatagagcacctgaaattttattgggtggtaaacaatattcaaccggtgttgatatgtggtcaattggatgtatatttgcagaaatgagtcaacgcaaaccattattttcaggtgattcagaaattgatcaaattttcaaaatctttaaagttttaggaactccaactaaagaagtttggcctgaattagaatatatgagtgattataaggaaactttccctaaatggaagagacaaaatttagcaagtattgttacaaaattagaccctcctggtattaatttattacaacaattattagcatatgatccagctataagaataagtgctaagagagcattaatgcatgagtattttagagttgatgatgataatcatcatcaaatggaatattctcaaccttcaggtatgcaagttgattcatctacattatatgcataatttataatttaaactgttccagttcagcatttcttttctatttatcaaactaaactacaatttttactttcccgttctttattatataataaaatacaattatataaaaaaatttagataacgatatcaaaagagtttttgagtatctttgaaaacattctccttttccttaattttgtaagctccagcaaaaatctctgggaactctctacaatattcataaaatatccattttctttgatcccagttggattcaacaggtttaaccttattcttcatacttccagaaactatttcacattctttccaaactctaagaacattcatacccatcattttaacaatatcttcctctgttgcacctgttgctttccaaacttttttgattaaatccggatatttagaaacatcctctaatcctacaggaccttgaggtatgccatcaaaatcagaaccaaaaccaacatgatcccacccaataagatcaacaatatatttgatatgagcaacagcatcatcaattgttacttcatcatgtccttcttgctttaaaaataatggaaaaaaattaatacaaacaactccaccgttttctttaactaattttaatacatcatctttaacatttctcccatgtttggttagtgaatatactgaactatgggaaaataaaacaggtgcttttgtgacttttaaaacatccaacatggttttatgtgatacatgacttaaatcaacaatcatacctaatctattcatctccttaatgcaatctttaccataattgttaaagcctttatcaggtaaaccaccagtaacagacgaagctgcctgttgcaaatgggttgtcacaattatgagtaagggtaatgtaccgaaacaccaagatcataatactgtctaacaactgcaagagaaagatcaacttgataaagaccttcaatacctaatgtaatagatatctttttatttccactagctctatagctagctaatgcttcatcagcagtatgcacaaatttgaaactatgtgaatattcatccacaagtctctttactacatctatttgttccaatgtatctctaacaatattgtttggttgatcagaatcttgataaaacatattatcatctttacattcaatccaataactaaaaaactgaacaccaattttaccttctttcattttaaccaaatcagtatgtgttgttaataatgaatcaaaattaaactcctttgttgttttaaattcattatgtaattgtacacgtaaattatatgggaaatcattgtgtgtatcaacaattgggaaatttgaaataatattattaaactttttttctatatcttcaacactataaactgtcatgattttggatagcactgaagtgaagaccttaaaataatgtctttctttaatccaaagataactagaatcctctgtcattatattctatctttatcttttagtaactttattttgacatattatttgaccgatgatcattgctattactttggttgatactgagtgaaatattataatacaatcgcttacgctgtaaccgacaattgtcgacaatatcagcggctgtattatttatccaaaaagaactatctgtagattagaataaagacaataaaaccgataattaagactacttaatcggaatatcaaacaacaaagaaagccactgtttgtcaaactctgaagatcatcgctatcaggcactattatagtctgataagataaactgagctgataagaaaaaatatttttgcgatgcgtaaagataacaattttttttacagagataaggaagaacccttatttttgacatgaaataagaaaggttttaaatttattcaaccgatctaataaatttttataaatagtgatctcatagttaaacaatgttatagcttgtagcttctaaaataattattgtaatatttatttgctcccaatatataaacactaaaagtttgttagaaaaacatgctaaatataacacagcaagcttcgcacattccagtagaagctgaactttcaagtgctttcttcagtgataaaaaccaaagaattgatgatgttttagaatctggtttaaaagcaggtctaaaaaatagaatgattaaccttattgcattatgtggtatcattggacctggtgttttcattggtatgggtaatgcattagcatctggtggtccagttggtttacttgttggattctcaattgttggtatattagtcttttcaatgatgggatcaattggtgaaatgaatgcagcatttgatcaaaattttgcaattttaggatcaaaatatgtttcaaaaggtttcggtgccacaattgcaattttttatgttgttatatggattacaaatattataagtgagtatacttcattaacagctgcattagaaacttattcatcaacagttccaacatatggttggtatttaattttttggtttattttcacagttttttcaatgtcttgatgtatcttggtggggtgaagctgaatatattttaggttttttaaaattagcatttttatcaggattttatatttttgctattgtttatgctgctggtggtattaaagatcataaacctaataatccttttggtaatttcccacttaaagatggttttaaaggtattgcaaattcatttgtttatgcaggtgttttctattcaggtattgaaggcatttcagttattgcagcggaagctagaaatccaagaaaagcaattccaacagctgttagaagtactattttcagagtgttttttgtttattttggtttatcaattttttatggtattacagtttcatataatgatccattccttactgaatgctgataaagttatgagatcaccaatgacaattgcaattacagaagctggatggccagggtctaaatatttagtgacaacaatgatttggattacatgctttctcttcaattaattcagcaatttattttgcatcaagatcattatttacatggtctaaggcaggttttggaccaaagattcttacaactgttaataaaaagggtgttccatatgttgcaattcattcatgtcatatttttggttttttatcaatcttatcatattcatcgggttcaacagttgtttattcatatattgtttcagtttctggtgttgcatcatttattgtttggacagtcaatttcagttacacatttaagatttagaaagggttggatagcacaaggttactcattagatgtattaccatttcaagcctatttttttccatggtctaattacgttgggatttttattggtattgttttaacattaggttcaaggctggtcatgttttaaaccatttgattataaaatatttattgatgattatattatgctaccattattttttattatttggttttgttatgatttcttttattttaaggaaaggtataattaaaccaatggaaatggatttccatacaggtaaaagacctgatcttgatgataatgttggagcagaattagataattatgatgcaagtggtgaaaaggctgatgtgattattcatacctcttcatcaactgaaaaacttacctgatatgtgtaaattagcttatttcttatatttttatagctttcatactttactttttcttttataactaactaaattttattttgaaatcaaaggaaatcaaattttaagttttcataactttttactaataataagattgacttttttttgtatattatataatctaataaacttatacaaaactttcattctttaaaacacgcctatcttagttagaatgtcataactcaaacagaaagtgtaaaaaacagcagctaaaaaaatccaaaaaataacacctaatctaccgcagcaagcatcaaatttttaacagcgtaattgcacgagtagctcagtggtagagcagcagattgcaaatctgttggtcgctggttcaaacccggcctcgggctcattactttttatattttttcatttagtaccttactatactccacagtaccttcacaaagtaattaaaattacgcaagatcacgtgcgattgcagatttctaatagtatttactataagttatcattttacggacatgtttttcagttcatttaatttaatttcatttcaattaatttcattttcaattaattactttcagttatttgccttccaattcttccttttaccctccttcttcttatactttagattatcttctttttaaataacttcaatcaactcaattaaactcaattaacaatgtttgcaagatcaattatcagaaattctgcttttaaggcaccagttagaagattcatctcattcgatgcagcttcacaaccaagaattagaattggttcaactgcaccaaatttcaaagctccaactaccgttggtgaaattgatttccatgaatatttaggtaattcttggggtgtccttttctctcatccagcagattttaccccagtttgtacaactgaattaggtgcatttgctcaattaaaaccagaatttgatcaaagaaatgttaaattaattggtttatcagctgaaggtattccatcccataatgaatggattaaagatattgaagaagtcgttcttggtggtaagaaattcactttcccaattattggtgatgaatcaaaggaagttgcttttaaatatgatatggttgatgaagcaggtttcaaagatttacaaaaaggtgcaacaatttttcactattagatcagttttcattattgatccaaagaaaactgttagattagttcttacttatcctgcttcagttggtagaaatactaatgaagttttaagagtcattgatgctttacaaaagggtgatgcaaagggtattgctactggtgttaactggcaagcaggtgatgatgttattattccaccatctgtctcaaatgaagctgcaaaggaaaaattcggttctttcaaagaattaaaaccttacttaagattcaccaaggcttaaatgaattcaattatctatttatttaatatattatatacattctatatatctctacttatgaaacgttaataaccactactaccaacattaacaatacagtaactgatactggttgattgcaatttatctcgcaaaaatattttttttggggttttcacttcttaaattttcattccactggttaaatgttatttttgttattatcaaaacaagcattaatataatcttcccataaccttccgaattatttaaatttcagtactattattatctaattaattaaatcacatataagaaatattcccataatggtaatgaaaaaggagagtgatatattaccaaaaccagaatcaataaatcgatcgacactggatcctataaatcaaatacaagtacaaaatcaagtacaagtacaagactcaacttcaaaatgaacatcaacatatcgtacctgcaatagaggctgaaaagcctcttcctaagaggaaatcaacaaccaatacaagaaatacagccccaaagaagaaaagaaaagctaacattaataacaataatgataaatcccctaatgatgatgaatttaatgatgacgattacgatgatgatgatgaaaataataatgaaaacaatacaaatacaaatacaaatacctacaactgtaactaccacaaacaatagcaaaaataatactaaacaaaaatctaattctgctgctggtcatagacctgttacttcatgtactcattgtcgacagcataaaattaaatgtaacgcatcctgaacaatttcccagatccttgttcacgttgtcaaagaatgggattaaaatgtgagattgatcctcaatttcgtccaaagaaaggttctcaaatacagtctttaagaaatgatgttgatgaattaagatcaaagattgaatttttaacaaggaatgaaaatttaataacaaaggtattacaaaatactccatcacagaaaattttgaataataataatagtccctaacaatattactagtaataatgccaatgatgaagctaataaaaatattataaaggataaatcaccttctttaattgctaaaacttattacaaaaggaacctgtattattaagtttagatgctagatctaattcaacacaattaataaatgattctgcagtacataaaacagatttaaatgctgcattgaataatgttggaataataaacaatcaatcagttcaattcgattcaaatagaatttcaaactcaaataaagagatcaattcgtcaaataatggtaattttccagaacaaatactttcaaataattcagtttcaaatttaacaaaattaacaactcccgtaaatacaaaatcaatttcacagaataacctcctttcaaatactcaaatatctgaatttatattaggtgaagttaaaatttcatttgagaaagcttcaactttacataaaagatttattgataattatttaccctatttaccaattatggtatcaaatgatccaatcgaattatatcaacaaagtcaattgttattttggactgtaatgttaactgcatgtttatcagatcccgaaccttcattgtataatgaatttgcatcacttattaaacaacttgcaattgaaacctgttggattagaactccaagatcaactcatatcgttcaaagtttaattattttaagtatttggccattaccaaatcaaaaagtcttagatgattcatcttatagatttattggattagctaaaagtttatcattacaattaggcttgcatagaggtaaattcatgactgaatttactagaactcaagttacattatcagatgctgaaaagtggagaagtagaacatggctggcagttttcttttgtgaacaattttggtcgtcaaatttaggtttaccaccaagcttacaaactgattatttaattgagagtgctagagttgatgattcattaccgaaaaattttagatgtttaatttcattagcaattttccaagcaaaattagttaatataatgggattaaatgtttctggacccgatggtttaatggaaccatcaaatagagcaattccacttaatattatggaaagggaattagagagattatcattcaaattacaaattgatgatttagttattgaaatttattatttatatgttaaattgatgctttgtttatttgcatttttacctgatacaccaagtgaagatcaaattaaatttattacaattgcatatcattcagcaactagaattgttacaattatttctaaattattagaaaataaacaattaacagaattaccaatttatgttcgtcattcagttacaactgcttcacttatattatttagacttcatttaacatcatatttaacaccaaaatatattgattcatcaagacaatcaattgttacagttcatagattatttagaaatatgcttgcagcttggaaagatgttgaaaatgatatttcacgtactgcaacagttttagaaaaattaaatattgtaattataacacaccctgaactattcactgaaactgaaggaataattgtacgtatgagatcacatttaactggttctttattttatgatttagtttggaacattcatgaatctcgtagacgtacaatagaggaggcaaagaataataatactggtaatactaatgctaatgatttaaattccaaagttaagatcaataagaaaataaggaaggcattaccattaccattttataatcaaattactaaggatgattttactgcaattacaacaacaacaccaaatggtacaactataacaacattagttccaactgatcaagcaattattaatgctaaagtatcagcatttaaagcaggactttctaaaccaactgaaataaatggtattccattatacatgttaacgtctactggatcattaggaaacaaagcgaaacagaatgcgaagtaataataataataattaacagtaataataatagtgttaatacgagtacaaatactactactaatatcaaagtaaataaaccaactatgaaacaaacaaaggttacaacttcacgtaggaagacaattagtaattctgatactaaaggatatgttccaccaccattatttgcaactgcaacaagtagtagttataataataagaataaacaaaacagtagtgttcaaatgagtagagcagtttcatatgatactagtatgaacaaaggaaatgaagaaatagggagaattattaataataataatatgaagaataatactactgataatgcaattattaatgatgatgtgagatttaagaatgcatttaagaataaagaaaatgatttcccattaactacaccacttgaaaaggaagagaatgaattaactacaccaatgagtatcaatggattagataagtttttccaatcaccaattagtgaaattgataataatggtacaattactaaaggtaagaaaagaacaccaatgagtcaaagtcctgccgattctgatttattagatgaaatgtttattgattcattatttcaacaaaatacaagtaagattggtgaagaggataatgatgatttacttggatggtttgatatgaatatggcaccagaattttaattaatattatggtatcgaaagcattttaaaatatataacagtatagaataaaataagtaatagaataatattattcatcttcataattttcagattcatcagttggatccattataccaccttgaccaattgcgaaaacacaatcagtttctgcaagacaaggggaatcataaattttacaaattctatttgcacctttaccctttttaaaatataatctagtagttgaagcatgagcaattatattaccaccaattggttttttaggatcaggattaaacattgcaccaccatcaacttgagcaacaacttgatttgttataacaactgcaataccaaattcatcagctaatctttgtaaagttctcataaatttagcaacatgcatttgtcttgcacttaattcacctctacctgaataatcagttctatataatgccataatcgaatcaacaattaaaagtgaaaatctactttgagccatcatttgagctgcttgatttaataactgtaattgatgatcagcattataagctcttgcataagcaatattttccattgcttcattttcatttaatccaaatctacgagcaattggtacaatacgtacaggtctaaaagttgattcagtatcaataaataaacatttaccttcaccaccacccatttcaacaggtaattgagcagttacagctaatgtatgacataattgtgatttacctgtacgaaattcaccgaaaatttcagtaattgcaccagtttctataccaccacctaataaagtatctaattgttttgaaccagttgttagagtaattaattctgaacgacgttgatgaaattcagttgcagttgtaaatccaagtgggacaattttacttgcctctgaaattaatttatctgcctttaaatcagatatacctttaattgttgttaaaattttctttggtgtataagcaattgattcaactgtacataaaccagattcttgtaatttttcaatatcttttttagatataccattaccaataagtacatcaattggagatggaccaatttgaccttcatcttcatcatcttccatttcatcatgtccatttccatgtccatgcacactactattttcagtatattcttgaacattattattaattgaagttgcatttgttgtattatcaccatttgacattgacgcgtcagttactgatatatcatcatctaaatgtgcttgttccgttggttgtgaatccactgataagtctatagcttcctgtgtcatttagtttatgtattatttttctaataagtctattactctctcctaacacccagaacaagacaccagataaaaagataaagaactgatccaaagatcaaatcaagagaaggcgaaacctggaaatttaaaataataatatcacaacttacgtaacccaatattaaatttcaattgatgatattaagagacactgagggcaaactattgaactgtatctttatattataagggtagaatatactaaatagacaaacacaacaacaatagaattcagataataatatacaatgagtgatccttcttctattaatggtggtactgcagtggcaatggttggtaaagattgtattgctattgcatcagatatgagattaggtagtcaatcacttggagtttcaaataattttgaaaaaatatttaattatgataatgtatattttgcattaacaggtctagcatcagatgttttaactgtcagtgaagaatttagaatgaaaacaaatttatataaaatgaaagaggaaagaattatggaacctgaaacttttgcaaatttagttagttcatcattatatgagagaagatttggtccttggtttgttggtccaattgttgcaggtattaattcaaaaactaataaaccttttatatgtggatttgattcaattggttgtattgattttgcaaaagattttatcgtttcaggtactgcaagtgatcaattatttggtatttgtgaagctttatatgaaccaaatatggaaagtgaagatttatttgaatgtatatcgcaatctttacttaatgctgctgatagagatgctttatctggttggggtgccgttgtttatatagttacaaaggataaagttattaaacgttacttaaaatctagacaagattaaattagtttatatagttcttatttatggtatattatatacagtgatttaattttaattcaatttagttacagacatgtattgtattgatactttcttttatttttcagtggttggagtattttctttaagtttattcttgtattctaattcaataactttctttaaataaccatctttaccccattcttcttcttcccttaattttttcttttcttctaatattttattcttttcacgtcttttaataatattttcacgatcacttgcaagtctactctcatgtaaacaagttgataattgaattttaacatcactacatttacctaaaacagtttcaaaaaatggtgatttatgacattcttcaagtgcatctataagatcttcacaattttgaaatctgtcacgatcaagaattggatgcatgttgtggttattagttgtatttgttaaatatgaaaagtgaaaagcaaaaaaaaagctgtagatataatagaagctggtcattttaatcaagttaaaaaaattgatttgtgcgatttcagtaatcatgaattgtttagacgttaggaggtcattttaggttgtttattatttatttaggtttattctattaataagtcattgataaatgtcaagtaaggacgaaaaggagatatttgaatttttggattcattaggagatgatggtaaagatggtaatggtgaaagaagtaggtaataatagtaataataatagtagtggtaataacaataatgatgatggagaaatattagattttttagaggaattagagaataagaaagaaattaaaagggaagaaactccatcaaccgctgttacaactgaatctgttgaattagagaaggaagagaagtatgttaaggaagattcataaggaagaaccaacaacaagagaggaacaaactcaaactgaacaagtaattgatccaattacagtcaattgcatcatggtggagtaatacaggctcaacacaggtgagtagtcaattgacatcattatggggtacagcacagaaagcaagcagaggaagcaattaaaatagctaaagaacaaaaaattgatacaaagcaaattgatgaattaaataaaggattaaataaaggattatcatttttcaatggtacaattaatgaagtttttgaaaaaattaataaatttaatcaaaatgatgaaactataaagataattttaattcatgatatggaaaatttaattggaattaataatttaattaaattaacatttgaagatgttttatcacaacaagttgatggaattattgatattaaagtaattgaaaatagtaaagtgaaaacaattgattcatcaattaatactgaaaaagttaatttatcaatgtttaatggtaaaggtagtgatgcagataaattaattttagcaaatattgaaaatgaaattaaagaacaagaaaagaacaataaagaagaaagaagaaggagcagaaggagaaggagaagaagaaaaggaaaatgaaaatgaaacaattatttatcttagtttacttgcatggacaatcaataaagattttgaaattaaacaatcaaaggaaattgatattaattcatattcaccaacatcatttacaatttcatgtattttaaaagatgaaaaacataatataataattaattcacaatctcaaccattaccattacaatgggctaaatgggttgaaggagaatttgaaggtaattcagaggaaattgatccaagtgattgggtttatggatggatacgtaatataattaataatttaattggtgttattgcacaagattatgttattaaaagaatgggttattaaaatgtggatgttataaagatttataaattattaataataatatattaattatctttaccattatactgatcaataattttttgtaaacctttatcagtaattgccattaattgatgatcccaatcaacgacaagtggtcttttaatgggtatttcacctatattgttaggtaaattcaaattttctaaatctttaactaaatcaacattttcagtaattgaagggaaggcagatttaaatgaaactttacaaaatggatgtgtatgtaaacaattttgtaaaaatttaaattgatcttttgtaattgaagttgaatttgtattaatatctaaattatatttaaattcaacatcttttgaagtaacttgatgttgctttaatgaatctaataaatatcgactcattttattatttatatcatgatataaagtaattgtccccttagtgccttgtaaagttctaaacattgtttttttttacgttgttgttataaaaagaagagagagagtatagtactataaaagaaagaaagaatggaaagaaaggaaaggagataaagacctttatttaaacaataagaactaccaccccatacagttatctcttatccgttgaaatccgtgacaatacatgacataatcaacaaggcgtaatggaagatatactcatttatcaccatatacgtcccatcttttatgattccataatggcattgcagttctaatatcatttaataattgtaaatcaatttcaccaacacaataaccttcttcattaatttctgctacaatttcaccatttggatcaattatacaagtatgaccaaaacttttccttttttcattatgttcaccaccttgagctggtaaaataacataacattgagtataaattgcacaagcttgagctaatttatggaaatgtggaccagttttaattgtccaagctgatgggaatgttaaaatttgtgcatttaatgaacgtaattttaatgataattcagggaatcttaaatcataacaaattgctaaacctaatttaccaactggtgtatcgaatggtggtaaaattttattacctgctataactgaatttgattcttttaaaattggtccattaggtatatcaacatcaaataaatgtaatttttcatatttttcagtaatttcaccaaatttattaaaatataataatgtattaattgttttatttggatttgaaattgatggaacatgaacaccaacaactacatcaattgattgcagttcctttaaagtatcaataattggtttaataaaaggtgatgaattaattggttttgcaattgcaattgattcctctgtacttgaagctatataatctgaagcttcagggaagaaaattaatttaatattatcattagctgctttacgaattaatgaagcaacttttaaaccatttgctaaaaggtcattagttgaacatatttgagctgcatgcaactacgcattgtttatatatatagaagtggttaatggataaataagaaagtgtggttcaagaaagattattaattgaatcgataaaagagattaaaatagtagataacaattcttacgtaatcttgtatattaatattaaaaaagtattttggagatggtcccctaagtaaaatttttcagtaaacttattgtaaagaagaacagtatatctttgatagacatacaacaatgacatcgatatgtattaatgcagagacattatgtcgtcataataagggattagaacaattaacatatgcattacatcaaattagtagaaatgcatgtcaatatgaagttaaagaaattgttatattaggaaatgataaagttgaagagagtaaaattttaacaatttgtgcaattttacaatattttataacaccaaaatatttaagtgaaggaagttttcaggaatagtattaataaattacctaataaagtatttaaaaaatgttataaaatgccaattattggtaaattaaaagattatttacaaggtacaaaggataatcgtgaaggtattagtataattaagaatattaaaagacgtaaaagagatgatggtaaagttattaaattaaataagaatgagaaaagtaccaaatttatacaaattggagaaaaggaaatgattgaaattaatgaagataatggaattccattaggtgttagagttagtattaatataaaggataagaaaatagttaatggagaagatatttgggggtatgttggatataatattcgaattgcaaaagattatacaagtattttcactgaagcaggaggagatggatatgagaaaggaattttagttaaagttggaattaatggtaatgataaagccgagaagtgatttaagtaaaagtacaggtagtagaataatttattgttttggatgtaatggtaaagaaatggaagaattatgtgatgaaatagttgttggatatggaaatagagttgaagatgcaattgttagtgttttaagtgtgattacgtaagtatatgtagatagagtaatagaaaattaaaataataataataatgtgatgatcattatatataatttgtatacgatatttacattcttttttttttcttagagaaagatacagataaatacaatatgggtatacttaagaatgctaaaaaggatgcaacatatcgtaaagaatcaccaaatgagattcatgaagtaattgaatttgataggaatgaagtaattaagaatacaaaggcgaatgctaatattggacattcaatagcgaataataagggtaataaaggaggagaagataataataaggaagaagaaataacttccccattaaaatgggatgaaactaatttaattgttaatgaaatgaataaaaattctacaatgaaaattgatgaaccaaagacaccatatgagggaggatttaatccaaataatgattattatagaactgataatgaaaatgaggaggatgaagaaaaggaggaagaatttgcattaggagaaggtattgatgataaagatgaagcattaccagagattgaaaaagtggtggtggaagatagtacgaaagaatcagaagaagaattagaaccagaatcagaagaagaacaacccactacaagagaaagaccactgacatttgaagagaaacgtagagaacattatttacataagggagatgtacttaaaagcagtaaaagggagtattaatacaaggatataaaggatataaatttaaaatccgatggaaataacaatattaattaatattacgtaataaaaagaagccaatagaaaaatatattaaggtgatgagccttttaaaaaaattattttattttaatttatttttctgtgtcatcattccactgaggtattattattatatattataattataattattattactattccgttcctctttaaaatggctttattcccctttttatgtttaattagtattattagtaattattttacttaattgattaaaattgccctgttttatttctatttctatttcaagtcttcccttttttttttttgccctcttgattaaacatcaccttcttcttcttcttataatggatatgaataatatgaataatactgatataattccatctccatggtcaatgtctcatatgaatcatggtatcccaattttaaaaactaatttaacggaaaatcaattactttattggaattcttataatacaacaacttatttaactttaaattcaaattattcatcttatcttcattctcatattttattattaattttatctgcatttttcatttatccatttgtcttaattttaaataatttaaaatcaaaattttatttacctttattatcattacattcattattaattacaatttcttgtctccttttctcaattttcattaataatgtccctgatttatatcctggtatggcttatactaaaatgattaatggtttattaattttcacttgtttacaatatttcttctcattatttcatttaattgattcttattcaaattctaaaaataattccatttctaattctaataaatatttatcaattgataattcaaattttaattcaattactaatattaattcaattcttcaaaatccttcttcaaatagtagtgataccgatttttcagataataatttaggtttaaatatctcttataaagataatattcaattaaatgatatagcttctccttctgcaactttatttgatcatgattttatagatattccaaaaatttcaaattcttcaaagaaaattaatcaaaattatccaattatcgttgaaaaattatctttaattactccattaactattttggcaaataaattatcatcttttttcaatatcttccataatttatcaacttggcttttattaatttattatttcgtactcttaccaactggtattgcttgtcttaacttgttaggtaaagagaaaagagttttcaatttattagctcattttattaaaggtggtgttttctttgctttaggtattttgtctttagctagatattgtggttgttttgctggtattggtggtgcttggaattatgcttgttttgatatttcaaataataataataataataatgaattatcaacaaatgatgaaatttcaacaactccttcaggtataaatggtatcggttctggtggtgataatgttaaatcatctttctttattaaattaaatcgtcttatttcttcaaatagaatcatttattcatttgaagcaattgaatcattccttattttcttttatggttcaactaatgtctttttagaacatttagcttctccaggtggtgcttggactccaaaagatttacaacatgtttcaattgcttttatgtatattggtgcaggtctttgtggtttaattactgaaattaaattatcaaattggaaaaaatcattattttatagtaataatgaaaatttaattaataattcatcaaatttaatgatttcaacaggttttactccaaatcctttcccagttttcactattttttggacaggtttattaatgtcaaaacatgctcaagcaagtcaattatcaactgatgttcacgttcaatggggttcattattaacttatggttcattctttagaattttaactttcttacttatgacattccatccaattaaaaataatctgttcaaaccaactaaacctttaactgaattaattacaagtttttgtttactttgtggtggtatggttttcatggaatcaactgatcaagttattgaagctttagcttatagaggtttaactccaatgtttacaattaatgtaagtgttggtataattagtttaattatggcttggataatgattatcttttcagttaaagattatttaaaatcaaaaatttattaaattcacaatcaaacaatcaaacaattatcaattatcaattatcaattatcaattatcaattatcaactttgttcatattcactccctttcatgttatcttatgttattttattccacttttatgttatccctaattattcaaaattaattttcttattctaatttctaatttctaatctccttttatttctctttcttcttacgttatgttatttaatcttttaatgttttgtttatatttatatacaaaaaagaaaaacaaatttataaattaatttatatgaaaacaaaaaaaacttaattataataatcaatgtaaatcactttatcttctaaatcttctaacaatttcaggtgctttaaatggtacttttaaaacagcaatttttgaaccaattgaatcactaccatcatttttattaccaactaatacttgacaacctaatgtacgtactaaagctaataattttgaaggttttaaacttaaatcacttgctaaaattgttaaatctaatctataatcaaataatgttaataaaaatacaattatatgacataaaattttatcttcttcctttggaccaattgaaaacattctaatttctctatcaaaattaattgatcttttattattaccattattattactattatttttactaaataattgtaacatataattaatacatcttgaaggtggaatatttttaaaactttcaattaatttatcacgacgatttactcgacgattaaaataaagtccaattaacattgaagtaaatgaaagtaattgtaatttaaattttaaattatcagttattaaatttgtttcatttaaaatacttttaaataatttaaaaataattgatgatttattatcttccttattaacatatggtaataaattaattttttcaataatattttcatcattataattaccatcaataaatgaattaattgggaaacttgataaaatttcaattggtataatttcttcaattgaataaatatcttcaacatttttagcattaatattaaatggtggtataactctattctcaatttcaactaatttattcatttcttccctatttggcatatttttagtagtttgtttaattccatcaattatatcaatttgtgaatcttctaaactttcactattaattttatttctacttgcttcattaattgctttctttgcctttttagtaccaaattcttcacctaatgcatttcttctttcagcatatgaaccttcaatttctttacgttttaaagttttaattaattttgcatcattaattaaatttttacttgatttaactctacctgaaaataatttactatttttaataattcttaatttattttctttaccattaaagataccaattaaatattgtgaatcattaatttcatctgcatcaaattttaataatccatttgttgattctccatgtaaaattgaattttttttagaatgattatataaatctaatttaatatctgctgatatatctcctgaatttgtaaatgatgcagctgcaacatctccactgactatatctacactaatcttacccttagtcatgtttaccccaaaaaagatgaacttatgtcagtgtcttgtcttactggaaaaaaaaaatttttaaatttttcacttcaatatgaaattttattattgctgcactggggaaaaaaatattttttcccataataaagtctattcaactgaataaatactttacgacaatggaattatcaagtaatcatatatcatattatcaaatacttaaagtatccccaaatgcatcattagaagagataaagaaatcttatagacaaagattattagaaactcatcccgataaacaacaatctaataattcaaattcaacaattcaattaattcaattagcttataaaacattatcaaaaattgaatcaagagaaatttatgataaatcattacatgatcattttattaaaacaggtttagttaatacaggtaattccaatggaatagatattgatggactagatataattgatttatcacaatttaatgaaaatgataatggagaatttaaacataattgtccacgttgtacatcaattgatagtatgattataaatgagaatgatttattagataatttacaaaatgatgatataagtacaatattagtacaatgtttacattgtagtttatggattggtgttacatattcaatgattgaataaaattagtttactaaaccttgtctttttttctcttcttcaataattgaactaattgcatcacccattaattttaaatcagttaataatccaatatgtccagcagttgatctaattctaccacataattcatatgcatatttttgtccatatccatattctcttgccctccaatctccttcactaccaactctatcaacactacctttaccacaaatatcttcttcaccttcaggtctacgtctacccttttcacgtgggaatgtccatccttgataaacaacaccatctcctggtccatagaaaaatctataatattcacctcgtttaattgattcctctccatcaactaatgaatatttaacacttggaacaccatttgaaaaaatttgtgacattggtggataattaacaccttcttgatattctaatgatttaatatattcactagtacgttttaatgtatctttaagatatgaataacattcaaggaatggtaccattggtttatttaatcttttaatttcatgtaatacaattgattcggtttttggatcaattttcatctttaaaaatctttttaaagtatgtcttaattcatcatcctttatattatttaaatttaataaaccatttttaacatcatgttttaatctaatatttgaaactaatggatttaaattaaattcaatccaattatcagcattccaaaaatcaattttatatcttttaccatttcttaaatcacggaataaacacataccaccatttttaccttcttcatcttcaccaccccaacttggtggtaagaaaacataactacttctcatgaaaaaatttgcttcattacttaaaatatctttacttaataaaattgcatcagtaaatcttaatggtcctaaaatatttgaacatggcattggagttccacaataaataacaccacgaacaattgatggatctttgatcattgcaccatgtgcaactaatccacccattgaatgcgcaattaatataatacctttcttatgagttgatttttcattcattctcttaatttcttcatgtaattgttcacttaaaatatctaatgataatctccaatcataaccccaatgttttgctgtaacatttggatttgaattcagtttacgtaataatcttctagatatatcaacgggtccaatatgtgttaacattccatcaggatacatatgacctgtttcattatcatcattaccaattgaatttaattcatcaacaatattttttctaccccttgcctcatataattcatcttcacgttttggtccaataagtaaacttgttttggagatatttaaacctgcctttaaaactggaatccaagttcttttctttgttttagcatcacgtaaaattgaacctctataaccacctaaaataataacatcaccctctaattcatcataaatatcaggtgtcatattagattgaaacagacttgcaactggtgacattggaattgatgataaaattcttgatgatgcagcattaagtgaagtgatatgattaattggattagttaaaagtgttgaggaagttgatgaagtttgtgccatttgttgagacggaggtggaatttgtgatgttgttaaattatcagcaagaattgcagctgaagcagctgctgcgggtattggagaatcaaattgtggaggttgttgacctggttgatttgtttgtaatggttggctctttgatctactttctaatgaattttgtatactcattggagatgctgatctattctcataaattgaagttgaatctgattttctaattttacttgtaattgcatttgagacattaattgggtttgcagctggtagaattgattttcttaatgctttgaatttaccatcatcaagacttgaaatatctctataatatcttgcctcttctaatgtatcaattgattcttgtctttctaattttaatttaataatttccctatctttaatttcatccattgttgaagaaaattctccaactatatcatcccaataaacagctacacctggtggtggatgaggacaaactggatgacttgaatgttttttggacttttcatgttgaattacacttctctcctttttctttgttcttagcacaaattttgtaactcttctagcagttttagaaatcagaggaattgaattcagacctttagacagtttactatgatgaatttcattcttatgttcataagctttagtaattgatttcattgaatcagtgtaaggtggttgatgagcatctaattgagtaattcttttttcatcatcttcatcatctacataaacaattgaacttctattttcactttgactgttacttccactaccttcactactttcttcatcatcttcatcctcctcattatcatcattattcgaaaatggaaatgcaaaattgaaaacttttttagtttgttcatcatccataccatctggattaattgaattggcatcatcatcatcatcatcatcatcctcatcatcatcggaaccttcgcaaccattagcaatttgatcaattgttaatacattcttatcagaattattaacattaaattgtttattaaaacttgaagatttatttgaactatcagataaatgaattgaaggtattgcatttgataaattattaacggataaataatttggagaatttgaagtaacttttggagatacaccaccaataattgattgtgcactttctttggatattgatctttcaggtaatccaccatcttgatgatcaattgttaaatgatttttatcattatcatcgtgatcaccacaatagtctattttatgcattgagttatttgatttaatacttgacatctataaagtatataattattctggataagatatgatatgattttatggggtattaacttaatttaactaaacttaactaaactgtaaaaagcaatttaaatatctgtcagctgatgtttttgtgtttatcaggatgtgataataactctaatatacgttattaagcgggataaaatgataaactactacgatgataagtgtaagtattatcagttgaagtttactcttttaagacataatagatacaatatattcacaataggatagaaatacccataaggaagagatgtgaataaccctattgttattaaataatttatgtaaaagacctcggtttatattatggggcaataaaattattttcttagtactattaatatttgccactatatgttttctttgatattactttcttttctataatcaaaggcacaatcttaagtttcgtatgggaataatgtactgtatatctagtgtatactactattatatacacctttatggaatgtgtctctgtgcctagaggaaaatagagtaacctaaaaggatataaatttaagctataattataatttttttattaatttacttaaacacttagtttataatccttttcgattggttgtgttttagtaatcttttcaattacaagtattttgtgaatgaaatttatggttattttaaaacataatattttattagaaagaaggttactatacatttttttttattttatattataacatagggggggggggggggaagtaaactaaaagtaaatcaaatcacatcaaatcaaattaaatcagattaattattatttaatttactcttaagtaaaagattttcagctttaagatgttgattctcttcaagtatttgcttataggaagcttcaatttcttcaagttgtgcaattcttgatttacgtctttgtctaaaagccttttgagctgctctgttttgagcagcacgtttagtacctgaaactatttgctttttaacccttgaatgtgtaatttgagaattaattgcagttggaatagtattagtattcatactattaatattattcatattactaatattattaatattattagaagcattcatattattgatattagcaatattattattaatatcattatcatttgaaggaatttgcatatccatttgcatttgcatttgtaatggatttaaacgttcttcctttgcaatgttattgatactgttattatcatcattatcattctcatcatcatcattatcatcattaccattatcattatgattagtaacatcatcatcattgttattgtcaccgttatcaactgtgtggactaccagtatcattaagttcagggtcaactaaagaatcttcaacagttttagaatcattgttgttgttattgttgttgttgttattcatcatgatgatgttgttgttgttgatgcaacttcagcagcagcggatgcaacagatgcaacagatgcaatatcgatatcagcggtgtccatcattatatattcagtagtagttgttgttatcttattatctaatcagagttgtaaacaaaacactgtagtgattagctaatttattaggtaagaaagaaaagagaatgaattggcaaattgtgggaaatagaggaaaagtggtgataatgggaaattaataatttattattacatgaaaaatttaattgagagcagtgaggatatataggtttggaccaatagaatcctcttattcggatattatacgatattgtacaattaccacccgctatacgatgtctgatcaggatcagtactttaattccttcccattgagtgggtttgattcacctgatagaagattacatagacattcaataccacttttatcaaatattaataaatttagacaaaatagtagtccaattaataattattatagtaatcaacaataacaataataagtaacaacaataataataataataacaatacaagtgcaaccaatattaatataaatactagtaatctcaatctgaactttaaataatactccaattaatattaatacatcaccaaattctgcaaatacttcaagattttttcctagtccaagtccaagtcgaaatcataataatataagtataaatcaaagtcagtttcagaatcaaaatgcaaatattagtccctcaatcaacgggataaatgaaaatatatcgatttacggtaatggattatttcataatcaaagttcaccattaaggtttaatatgtttgatgaaaatcttttattatttaatagcaataacaataacaataacaacaaaaataatctcaatcaagttagtaagtcataataatccattacctactccaacgcctaaatttgacacaagtgatatttcatattttgattttgatattgatagttttgaaataccaaaatcaagttttgttgatattgatgataatgatattaatgaattaccaattaacttaattaacaaattaaccgaatgtgaaattgatgatattggtataataggtgaggaaacggaagaaaatactaaagaagatactaaagatgatataaaagaagaagatcaaactaaaacacagaatattgatttacaattaattactaataccaatatagaagcagaagaagagactgagatagatttggatgatattgaaatatcaatacccaatatgggggatgaatttcgaatctaaatatgataaagaagaatccgaaatgtacaactatacgaatatctcattatattaataatataattacaagacatgatattgaatgtcataaatttaaagtaattggaggtaatgaatcaataatcaaagatattttcaattcaattggtgaattaataagtatagaggaaatagatggagagtttatagttattgcaaatatattagtatcatcattaagtaatacattaattgaaggtaagactattggtgatataagaattaatcatgaaaatataataaataacagcaataatagtgataataataatgcaattgaagatttaaatgcattatattcaaaaagtaaatcattaacaaagaataataaacttgaagtttgttggtatcctgaaagttttagttcaacatttcatagaaggggtgttaataattttatgtttgttagagaattaccaagtaaaatggtaattaatagaattagaaatggtaattatggtatgattgaaatgggtgaaattaggttaagtataccaattaataatgaagatattaataatgaaaagataaagagatcatttcttgttaatattgagattagagaattagagggagaagaaagggataataaaagaggtagtaatacaagaaatataagaggtggtggtaatataagaggtagaggtagaggtggtagtagaggtagtggtaacagtaatagaggaagtaataatcgaaggtagaataataatatcaatgcatatagtagattcaatagaggatataactttatcagattcattaaatcagtttttttatttgtatactcagtgactaatgtctcatacagtgtgaatgtaaaattgttcatcattaaagttatattctattgtattgtagtattctattctattcatttattcttctttctctgctaaatccccctggatttagacttcaataataatagaattaaaatctaataatcagttaaacgacatatctgcatgactgtaacccccacacgattttgtacacttgtgtagttagataggatacaaattcagtccgcctgtcggtatataatatcatcatttagaaaataaaaagaaagtaataaaaaaaagttaatagtaataataataacagactgctcatacaaggctgaaacttaacgataattgtgttgtcaacatgtatgtattcagtcggaacaattgttgaatatgtgtaatcactgcagtgttaaaagaaacaacgtagtaaaggaaggtgaaacaagtgggaaaagctattgtatttatagtaaaacaccgcgaatcttaagggtttaccctttatttagagggtttatacactagaactatatacactattaagactttgtaggtttaacttactgtatttgtcaaaggtttcctgtggagttatactgataccaacattgttacggtaacagtatatgtgtaaaagagttgttgcacctttgtatcttaattgacattcttgttttgtctcttcttcaattatttcctttacaatatctaaaaatgtatctctttcaattgtatcaaattgtcttctaataaggttaacattatattcctttaaaacttccttaccatgtttatccatataatctttaacactcttatgaattaattttttaatctcaatttcacttgcattacatgacatatcaattggtactaatctttgaacgtatctaccacctttaacttcaccatttttaacattatcacatatttttgtgacaacttcactaggtattaatggtttacgtatttgaaaaaataataatgattcaacacctaatggtacaccacgaaataatccattaccattctttgaatcctcttttctaatctctgcaagttccttctcaactgcatcttcaacagagagttctttaccatctttaccatcatcttcatctactgctgctttttcatcctttaatacttcacttaaaatatctcgtaattctctaccacctgctgtttccttacgtattgaacatgatgcatatataccatattgtccaggttcaacaactgtatgacatctctgtctcttagatgaatcctcccccattaccactactacttctcttacccattactatatatcaaaatgtattatcttaaaaaatgcaatcaagaatggtcaatacaaatttcaatttgttagcaaagctgaaaattttagttatgggaggctcagcagaattgggtacatcgattatttgcaaacacttgaaagttacatctttccattcaattttaatcgttgatcaaattcataaatctataaaaaaattatgtcatttaaaaagatggaaatctaatgatcttaaccctaattaaaagaaaaacattagatgaaaaaagagatacttttgatagtgattcatccgatctaagttcattagagaaaaatgatattgaagataaggataaggataaacttatacgtaaaggtgatatatttctgcctatctactgatgtatttattttgtaatttatataagttattaataattataatcccataattacaccatacttgcttctatttgtgctttaccatttttacgtgcttgtctctcttcaaatgcttgtctattttccaacactctagcaattatactatctctgccagtagtatctgcttcaatgggtccttcaactgttaacacttgtttataaaatttctttaaatcatcttcaccttttacactgttaacaataatcccattgatatatttactctgtaaaacacataaacttctctctaaattattcataacgtatccactaccatcattatcactttcaataccaacaattatatcaaattcattatcgacatacttctctcttaactctttaagtaataaaatatgtccaggatgaaataaatcccaactaccattaataaatattgctttctcattcattcctttacccttaactaatacttcaccatcattattgaaaacccaagcaccaatactttttgcatcttcaccctttgaatacatttcaaattgttttaatgaatttttttcccatccttccttaagataatgatcattattacctctatttaacattctaccaactaaatcagttgtactaatattaggagttctcttaacaactataaatctacccatatttttaacttccgcataacaatcattaccatctttatcagttgtgatatcatcaccatgaacaacatatttacatccatattcatccattacatgataatcagttacataaggtgcattggggacaaccaatgtacaccatctacaaccttcaactgcaataactctttcatttaatttcataactggtggtcctttattaattaaaatatcttcatcattatgaactccaacaattaactcatccccttccattctagcctgtaacattgcacctgcatgtccatgatgtgcaaagtcaaaacatccatctatccaaatacgcattgtcatcaatctactgctgtggatatatgcaataccaataagggtaaaaacagcgtttcttatatacacaacgttgttaaatagccacagtgtggtggtgataatcgcggtctataaataccggccacttatctcccaactgttatcttacttttatcttactttcttttagtaaagtcaattataatcaatataatatatatataatatgtcattagcaataccacgtacaggagataagattccaactttaggttttggttcaggaactaaatggcaatggaaaaagaaaggtaatgaaaatactgcagttacagctgataatttattaaatactgatccagatttagttaattcaactattgaagctttagagacaggtttccgtcatttagataccgctgaaatttatacaactagaccagatattggtttaggtgttaataaatttttacaattacatccagaaattaaacgtaatgatttatttattactgataaatatcatgctatttcaccacatatatcaaatgaattaccaaatggtaaaattagaggtccttatgcctcattaactacagggtttaaaattaatgaatttagattatattgatttattcctgattcatacagttgaattacctgaaggtttatcattaggaagaagcttggaaagaaatgattcaattacaaaaagaaggattagctaaaaatattggtgtttcaaattttgatattccacatttagagacagttattaatgttgataaagattatccacctcaagttttacaattagaatttcatccatatttacagaatcaatcaccaaatattttcaaattttgtaaagaaaataatattttaattgaaggttatggtccattaatgccaattacaaaggcaaaggatgaaggtccattaattccattattaaataagttagctgataaatataatgttacaacatcaaaaattttacttaaatggtcactatctcatggtgttgttgcaattactacaagttctaaaaaggaaagattaattgattctttacaagtttatgatttccaaattgatgaagaagatttaaaggaaatttctaaagttggtaatactcatttctatagagcttttgcaatcaaaactttgccacaatgggatgaacaattaaaaactgaaagaaatgttgacaataaatagaataaacttaatcactagaataaatagaatattttttttttatgtaataataaattatataataaattatactattataaagcatttttacgtgtaagatattcaaatctactaaatgtatatccaataaatggtaaatcagtttttgcattatcactatttttcatatttaatctatcattttcagcttgaattaatgcaggtgaatcaggtatattctctaattcatcagttgggaaaaatctcgtatcagtaattgatcttaattttggtataaatggtgcttcaacatttctaatttcatcccaattaacacctctaaaaaatggatgtctcttaatatcatctgcaccattatgtctacctaatctaatttctgcatttgttaataatcttaaaattaaatcttctgcttcagcacttaaatgaatatcttcagggaatactaaagtttgtttccaattaagaatttttttataagtttcagttggagtttcactacaaaatggtggccaaccaattaaacattcaaacataattgcacctaatgaccaccaatcacattcttgtccataaccttgattgatgaaaatttcaggtgcaatataatcaggtgtaccaactgttgaatatgccattagtcgacgagattttctccatgtttgcatttgttgtctatttgacattgttaaattaattggatcaaccaatacactatttcttgatttatttggtggtataattgtattgttattattattattattttccttttgtaataattttttataataatttgaatcatgagttttatgaaatcctgtacttaaaccaaaatcacttaattttatatgtcctctcatatcaattaagatattatcgggtttaatatctctatgaataaaacctaatttatgaactgcttcaattgcaagtacacattctgcaatataaaatcttgtaacatcttcagtaaatatttgccatttaattaacattgtcattaaatcaccacctggtaaaaattccataattaaataaagataaagagaatcttgaaatgaataatataatgaaacgacccaaggagaatttgcatcagctaaaacatccctttcagctttaacatgagctaattgatcttttttatacatttcactttttaataaagttttcattgcataaattttaccactatctttcttttgaactaatctaacttcaccaaatgcacctttaccaattactttaacagtattaaaatcttctaatgataatcttgtacgacgtaatcttaaataatgtgattcatttttaccaaataattgagtttctctatttttacgttctaaacttatatcattattatttaaatcttgttcaaatttaatcctacgttgattacgttcaattgcatgttcaattgaagttttataataatgttctaaagttaatttaacagctgatgatctatcttgagtttccttggagaaccaatctggatgacgttcaaaatatacataattattaggagtattattattattattatttaatgattgatcattattatttggattaagatttgatcttaatggtatgttattattcatattcatattattcatattattattattaaatttattattatcaaatgaagaatttgatgaaattgttgctaaattattaaaattattatttgatctaatacttcttgaaggactatttggaggttgtggttgagagaacattccatcataattacttgggagatgaactaaaatttaaattattatttgatctatttgataagtttgtaaatgagttgttgttattattatatggagagttaatcattggattgttaaatgtattattattgttaatttgattattattataagaaaattgattaattggttgactatattgataattatccattgttgaatctgattgatccatcattgtttgatccattgtagtatcagggtcattcattgtataataaattgcataccaaaagaaacaacattaaggtgatttcatgcataaaatggtttctaaagggtggtattataagctttacagtgaagatcgcgttttattatagtattagattaggtaatcatatttttactctatattatactacatggatatcatttcaatagtaagtgaacttatagttatatattaatattaaataagtaataatagtataatataaaaaggagttgtacataatttgtaataacatacatacaacacaattagaattgtaaagcagcacccttttgttttttatcaccacctaattcgaaatgcttacatctctttaatggtaattgaagcttagttttacaagcaacacattctaatcttaaaacaactttctttgtagtctttgcctttttatggaaaactggctttgtttgaccaccataaccagattgttttctatcatatcttctcttaccttgagtatataatgaagctttacctgctttatattgagtaactctatgttgagtatgttttctacattgtttacccttacagtaggtctttctagtctttggaacgttaaccattgtatttagcttgcttaacgggaggtaatatcaaagattaaaatgaaaaaataagtgagtaaactaattaacctaacctaataatatttcaatatgaaaaaaattggaaaatttactaatattcactattactttctattactattactattactattactatattacttaagcaattattcttcatttccactcttagaggaattccttccgcgcctggtgtgagggggtttgaaagcggatttttgtcagctgtagtgagtgagaagatttgggggtttttttcacatatggagggtttcacgtgaggattaaccctggggcagtgtcacgtgtgctggtggctcattatcttattagattataatttacaagtagttggtattggaatatcgttattaaatttgttatctatcgttaaaaaatatcttttataaaaaaagaaagttgtagttcatctctatcatcatctctatcatcatctctatcatcatctctatataaattgctttattttacccttaaattcatttatttcattaggaatttcaacatatgtattatcaacatcattaaattcataatttaaaacttttgaataatattcaagttttaaatattcatcatcactttttcgtatcatttcaatctttggtattaaattttggaaaattttcaaaattccataaatattatcattaattaatctatattcttcaattactttcttgaaaaattcacttttaaataatttaaaatattctttggttggtaaaaaatcaattatcattgataaataattattaattgaataattaatttccatcttctttaaattttccttataaataattctcttatatccttgattaagtattaattttaaaattatattattgttatcattaatttcatttacctttaaataattgattaaattaattattatttgatcatttaataaaattgaatctaaatttaaaatttctctaattgtcttgaaaattaaattcttattatttgaattaataattaattgtaaataatttgataaataatttgataaataaattgaataataatcactttcttctttaccattaccatcagtatttaatataattggtaagaattgtgaattaaaatctttcctaattatgataaaatcccaaattttcattgccattgttaaattatttgaattaataaatgaatttgataataaaataagtgatttaatatttaaatttggtaaccaatcaaatttagaaaatttttcaatcattttaattgataaatttggattctttaaacttaatgattgaatataaattgataaatattgattaattaaatattgtgtttcatcattcaatttatttggtaaattatttataattgtatctaacattaatgaacttttatcaaattcattacataaattatatgattcaataattgattgataaattaaatcaatgttgttgttattgttattattattattattcttattagccttagtacctgtactatcactattattacctttgatctcattattatataattcctcaataaatttaatatcattgaataaagttgaaaattttataatttgaattaagaaatttgatttatttgattcattaattttatcctttaacatattataaagttcatttgaattaattaaatttttaattttatagtaatttagacttctaattaaattaatataaatttcattattaataaatgatgaattaatattatttttttcaaatattaaaaataaatcaaatgaaattttgaaaaattcataaccaatcttataattttttaaattataagatttaattgatgaattaactaattcattaataattaattcataatttcattatttggttttaaattatttgttaacatatctgaataaacattaagtaaatgagttaatttaatttctaatgattcatcaatatttcttaaaactattgattttaaaactttatgataaatttctaaatttggtataatttgattatttctcaattctattgaaaacaggtaaaatttcattatatttattaagatttaaaaaattattaataatgtaaagttgagttgtaaccggatcttccttataaagaaaaggttcaagtatattatcaatattgttatcactattaacaggattggtattaatatgaacagttgcattgtcaatatgttcttttacatctttgatattcttcctttaaatcttccttaacttccttactttcctttaattcttcaattttatgttcagttgaaaaagatcttttttgattatttttcagtaaagtaaaagctaaagaatttgatattgaaacttgtttaatattatttgaattagctcttctaatattaagtaattgtattattattattaattgaatcaatagatatattcagatgagaatttttattattgaaagtagctttaacactattattattattagtagtagtgatatgtaaattatttaaatcatttaataaattattaatattttgttttaaatttaaatttttattattaaaagaattttcattattattaatattattattatcacaaaaaccataatttttagcaactgataaagcaggagcaacatatttgaaaatacttttcttattatttgtatgagaattattattatttgatttaaaaccaatttcatccaatctaactaaatcctttggaggtatataagatggattaaagaacttatgagtagacccattagttgaggaacagttccttgaaaaggagaaatgagcccttttgagttcttaaacgcatagttgtccaaataaaagaagaaagagaagaaagaaagttgttaaagacggtaaataaaggataaaaatttgcctttcaataatgatccctctccataaaatttaaaatttaaaacttcgctgagctttgaatttataatactgtctttctattggttgattatagcagattgtagtatttcatacattatacactataatagtatactaggaatggacgatacaatgactataatacacttagtacattactacaatgattatatactataataaaccaataataataatatcaataataatataccataaaataacaaaacaataacaaaacaataacaataagtaaaaattataggaccgcatggcatgtttcttatctaatttattatctattaatatcgtatattatcaaagaaggttttcattatcatgattatatgatcattgattattgattattatcatttattcttttattctcttttcttttaacatctgctcatatgcagttggataactactctttcttagactctatagatttactctcatttaatactgataatcattgtactttagataacaatgatattaatgatgttaatgatgttaatatacacatattagataatattaatcaaaggcccaatttccatttaaatgaactatctcttaattctccaattgctttatctttgaatcacttaaatgatactaataatgatatcaaatctgataacattgataacattgaaaaatcatcatctcctttttccttcttcggcttcctccgtttattcatcatcatcaactagctacaactactacaactaatacaaataatacaactgataatacccctaaatacgttaatacaaaagatataaataacttatctcacgcttatatctcaaattatataaataattcaaataatataagtaatttcaagtacttattaccactactgacactactacttcaaatacctatacaaagataaaatctccaactttgaaaatctcaatcaaaaaatgattataattttaagtcatgatcatgattataacttatgaatatgacttataataacaccgctttgaaaaatttaatgcaaaatattaatccacttacatataatttagatgttgaactacaaaatgatttaatacttactgaaaatgatgaaattgaagcagatggtgataatgaagaaattggatgatattgataatcttaatgattttacaaatctaaataatgatttaaaattaaatctatcacatcaaaatgaaggataatcccgttattaagaaaaataactctaaatttacaatgaatactgaatcatcaacaacaacaacaacaacaacgaccacatcttcaactcctatgaatacaaatgacaaagaaataaattcattttatgattcaaataatgatgaatcaattgaagaacataaaaattcttttataatattacaaggtaataaaaaaataagtgattcaagattatcacttgcacaattatcaattgttttaaatttaaagggtaatgatgaagaaactgctaaaagggagaaaaatatactggaaatattgaaaaatgatttaaatttcccaattggtgaaaaaacttggattagagatactccattaattgaaagagagaaaattataaataaattaactgatttagttgaattaaaatttaattatggttacaataagaaaatactttcaattattgttcgtagagcaagttattatatgatgcaaggtagattaagaagagagagaagattaaaacgtaaaaaggctaaaattaataaaaataatacattacattaaaaaaacactctgtaaaactatgtaacttaaacttaaacttaaacttaaactaacataatataaaataacttctgccccgccttttccaatatttttctcagtcttttccattctattccatttatcggacttatttctccccattatcaaatttcctttctttgttccaataatcattaaccattcattcgataaaatatgtcggattcacaatcaaataatgatacatcagacaacgatccattgaatatttcagaattatccaatactttcgatcaattattatcagatataactgatcaatcaaatttattatcaaatgatgttttaaattacgttaataatcgtaaattgataatggataataatttatcgaaaattaatgaaaatttatctaattgtgaaaaattaattaattattctgataaattattagaaaattatgatttattacaacaattacaaattttttcaaaagattttaatacaaggttacaaattgttcatcaaaatttaaaaaaataatactataatctttactaatatcgtttaatttcattctttaatctcatttcttcagctttataattctttaattcttctaatttcttcttaaatcgtatattggcaataacaacataaataactccacgtaatttattaataggttttaatctcttttcatcaccaatatcaactctaatacctccattctttaacattctcttacaaattgaaaatactttcatctcgattcttaatcattaatttataatattcaatcataaatcttaaatctctcaatttattaccatattcctttaattttaacattgctaaacctttttgactttgtaaaatatttaatctaccctctgccctgcttggtgattcagggtgttggtggtgtccaattattaatatttctttcaagtaatctattacgattctcaagtatctcaatcttaccctttaatctccttatttcatcatcattattagaattactaatactttcctttaattccttaattttacctattaattcatccttcatgaaattatattcctcaacaattgaattatattgtttcttttgttcttcgatcttactttcatattctttaatcttcatatcatattctttaatcttaaatgaattaactaattccttcttttcgactttatgactgatttctgtagtcttatctaatataccatcagtttccttcattgaattcttctattaacatttcttaaatcattcatttcactattaatcttctcaataatattatttaacctttcaatctctaatttcctctcctttaatcctaatcttaaaactctcttatcatcttcaagtttggtaatattactctttatttcatcgttatattccttatatttactaaatttctctatttcaactttcaacttagaattctcatcctccagttgaatttttgaatcctctaattttcttttatctatatttaattcattaactttattacttaattctgtaattttagaattaatagattctgtatctattataggaacctcagattcaactaatcttttcaactgtctcttatatctctcaatttcatcatttttggaactaatttcatattctaataaatttaattgttccttataattactaattacactcatcttttcatctttaattttcttatattcaatggacagtttagctaaatcatcgcttaactgatcagtaacatcagatttaagaagtttctcatatgtctctttcaaatcatcatattctctccttaaagctatgtaatcattaattgaattttcacttttagaactcgactcttcaaatttttcatataaaattgcatattgttcttctattttatctgcaatgcttttagtttgttcatgagcttccctctctttctcaagttcctccttcaattcataaatctgttgataaatttcatcatgatcatcattttccacatcatcctcaacatcatcctcatctccatcatcttcgtactgtgcttctaacatttcaatttttttctctagctctttaatagtttgttctgcctttttcaaattttggtacaaatcctttctatctaagtttaaatttttattatccatttccaatgcattaactgtatctttatattcctccaattgttccataatttcacgattattgttactaacatcattaccattactcaccacattctcttgcaatgattcaatagtctttaattgtttttgtatttgaacacttaattttttaatttcatctcgtaaatccaattcaagatcttttaattcattattgtctttagataatttattaatagagtttgatgagtcctctagtttattaatcaagttatctcgttcatctttccatgaatgaaatttattcgttaatttttgatctttatcattattttcttgttcaagttctcttacttgtaattttaaatctttaatttcattatttaaatcttcaataatagatgaatttgattccatatgcgatactttctcattactggtttccatttcatctatttcttgttttagttgttcaattttatcatctttcttcattatttcatcctcgagttcatcaatcttattatgtaattgatcattttcattttcaactctatatttttcatcagatagaaattcaattttttcttcaagtccttgagaattaagattattatgactaatattcgttagttcatcctctaattctttaattttactttcatattcaaattttaaatgaattaatttttctttctcatcaagagtattttgatatttatcacgcaataaattcatttcacgtttattttcatttataatattttctaattcataaactttatcattattattagttacaattggattttgctttaaatgtaatatttgtttctttaattcaatattttcattaattaatttagctgaatcagtgggtattcctttaaattcctgtcgaagtgttactacttcaactttcaagtttgtattttccacttctaattttttaagtttttccaattgttccttaaccatattagttccatcttcatttataatattattattattgatttgattttgattaaaatttggtaatatatttctaccattatgaacaccatctctaccaaataaccttgcagtttcctcattccttccattaccattttcttcacgtactgaagatgcagctgatgaatttaatgctacaacatcatcatcatcatcataattttcttctgaaactttcttcattctatgtaaatttgtagtattattattaatattattatcataattagtattacgatctcttccagcactacttcggaatagatcacctctattcattgtccatgttggcattctctcagttaattccgagaaaatatctgatcctatcctaccagcggattgtttacccattggtgtgaattctcccacaggtgtacctttaccaccatctttttttccagtatcaggtgtaaagctcattattatctgtggtgtcttactttactttacttaactcccctttccactgtcaatcaatgagaagtgcaacaaagcaatcaggtaaaacccatagaaaaacaccaagatgaaacatgtaaacatgcaaaataggggaattttattttcttcgcgtagtatttacataataaaaatctacacactatctacagctttaacgaaggcttctaatgataattttgcagagccgttaactatactttctcttgccatttcaacaccttctttccaattacttgccttaccacataccacagctaatgcagctgaattcattaatatataatctactaatggattaacacccggttgtaataattctttatctgttgtatttaatatctttgttaatatttcagcattttcacttggtgtacctgatttaactaattctaatgaatgttcaggtaatccaaaatctgacggtgataattcaaatgtttcaattgcatcatctggtgtatccttacgatgaaaccaaattttagatttaccaattggtgaaatttcatctaatccaatctcaccccaaacaaccattgtatttgcacttttattatttgcattatcaattttaattgctgctttacaataaatttcacctaattcttcagtataaacacctaaaattcttgaacttatattaattggatttaataaaggtcctaaaatattgaaaattgttggtatacctaaatttttccttacattaacaactttacccataccatgatgaaaagctggtgcaaataagaaacacaatttggaatctttaattatagttggagcagttttagaattaactttcattaattgaacacctaatttattcattaaatcacctgaacctgatgaacttgttgatgccttacctccatgtttacaaatatttatacccatacctgaacttataattgcagcagatgttgaaacattaaaagtattttgtgaatcaccaccagttccaacaatatcaacatatccatcattatctaatgatgaatgatctattttttcagaatatttgagtattgtctcaactgcagttgcaatgaaatctggattaaaatcaagtttatgaattcttaatgacgttaaaaatgatgaaatttcaatatcatttgcattatcagtgaatattaaatctaatgcttcagagaattcaactggtgttagagttggagggtttattattaatttcttcaaatatggagttaatggttttgacattgttgatattaagaaaagaatgtctatactatagaatgtccaactgattattaacttaaagatcgaacataaagttaagactcatacagttactaatataatacccccccacaataacagacccatcgacgctgcaatgattataattcatttcctaattaaaattaaaatttacgtgtttccatgttttcaattaagatttattcgctgctgatgtttgtttagacctgttgatctctgatttaataacagacatatacatatacgtgttgacaagaacaaaatgagtgagagttatatacctgaaccaattggtattgccaacttacctaatcaaagatataaacttgtattaaaggagggttcaactttcactttaatggttgcaggtgaatcaggattaggtaaaacaacatttattaatacattatttcaaacaaatttaaaaccaactaaagattcacgtaatcgttttaattcaccaattaagaaaactgttgaaatcgaaataattaaggcagaattagaggaaaaaaattttaaattaaatttaaatattattgatacaccaggatttggtgataatattaataacaatttatcatggaattcaattattgaatttttagatgatcaacatttatcatttatgaaacaagagagtcaaccagatcgttctaaaattaaagatttaagagttcatgcatgtttatattttattaaaccaacaggacatacattaaaacctttagatataattacaatgaaaaaattaagttcaagagttaatttaattccagttattggtaaagcagatactttaacaccaaatgaaatgttagaatttaagaaaagaattagagaaattattgaaattcaagaaattaaaatttattcaccaccaattgaaattgatgatcaagcagcaactgaacatgcaaaacaattaattgaatcaatgccattttcaattattggatctgagaataaatatgaagttaataatgttcaagtttatggtagaaaatttccatggggtatagttgaagttgaaaatgatcaacattgtgattttagaaaattaagaagtttattattaagaactaatatgttagatttaattttatcaacaaatgaaattcattatgaaacatttagaaataaaatgatggatagtgaagatattagtgaagttaataatgttgataaggataaattaagtgataaaattgttaataatcctgaatttattgaagcagagaagagattaaagagatattttgcagaacaattaagaaatgaagatcaaaggtttaaacaatggaaacaaaatattcatactgaaaagaatagacttaatcatgatttagctcaattacaatcacaaatgaagaaattagaggaagaagttagattattacaagaaactaagaaaacttcaatggtatagtctatatttgttttttctttataataatcataataacaataataatatatctacaatttcattttctttcattcatttttatagtttaaagtttatattcccccatttataagaatctacaataccatttacattaaagaaaaaaagaaagaaacaaatgatatggatgatgaaaatattaacactgtttgaatgttaatacattttctgattgatttctttctcttattcctagatttatttgttcatttcatttccaatttaaagtaaagaaattaaattataaaatataatataatatagtaattttgtataatagatgtaatattaatattaattaaaaatgaattaattaacttaatcttgagctctctttgcagctttctttgcagcttttctatcagtaccaaagattttctttgatctatttttcttttgctttctttgttgtcttgcagctttttcaactttagtagctaaaccatatctaactaatctgtaagctggttcaaatttctttgcatcagcaacagaattgtaaactaaaccgaaaccggttgatttaccaccaccatattgagttctgaaaccgaaaacagagacttgatctttttcaactttatataaagcagataattgttctcttaattcatcctttgaaacatttgctctatttgggtgaataacatcaataacaaattgtcttcttgctaataaagcatttggtaaaacctttctggttctaatagtgattgcgtcagacattctttattagtggatgatttctggaatggaatattagaaaagggtattaaattaaagtaaataaatttaaaaataatggtataatactaacaaaggtatagcagtaatattaaaattaagagtgaaaaattgtattgaaattgaaattgaatgggtaatactaacccactactaatagaataactgggtaatttccaaattttccaccaccgtctcactatttttttttctcccaccatattcctcattccatttcaaaagaaaaaaaaattttgccaattatttttccagacacactcgcaccgcactatggaaattcaaattatcaggaaacacagtcacatcaacaatttttcatttgctgcgccactctatattttatctaatagctgcgccgtatttatcaacggattacgtaacactctcggtattttaagaggtctcggaaaattaactaattttattacgtaatatttatttttattaatagtgtacatacactataaggataactaatactaaattaagcccttattctaagtataaaattgacaataactgcaataagtaaaaagaaacaaagcattgtaggaccaaatctatcatcataaggacctgaatcctcttcttctaattgcatttgctctccaatgataagtaattaatgcataaatcattgtacccattgctaatattgtaaataatgatgcagaaattctaccaactttatcaccaaaatttaataaaccaattgctaatgatccaagaataactgtaaaatttaaccatgaaagaaatgttctttcatttgcaaagaaaacttttggttcaactctagttggtaatgcaattcttttacctggaactgtttgtaataatggtgctgatgacatttgttctctgtttattgttatgtttattagttatattatattatcctatctaataagatgttaattatactagatattaatacaagttctttaaatcattaatttacaatcttcgatgtacttaatctttaattaaattttctattgtactgcataataatattaaaatttctgttataataagtacacgtgcctactccgaagttacgtaagctcgactttttaatctcttccaaatgcttattttttggggtcgatcgaccgtaacatgaatatatcagattgaagagagtctacaataagatccgattaactatatataacgcaaggttctttcagagaaataactataaacgatgactgtaactccagtaatcaaaactaaagaaattaacccatcctaaactagtatgtattattatcaaactatccattgaagaataagtactaacatttccatatgtattttcagcccattaatgatactgaattaactcaattcataaataatcaaataatccacaaacaacaccatttcaattaatcaattatgtgaagaaattcttaaattacttaaaggtaagtcttcgaaatttaaatatatcatcaactcaaatatattttcaattattgattattctgataataataaaattaattcatcatttaatgctttatgggataacgaaaatgatggtttatttaatattcaattccctttaaatgacaaccaaatattacttacaataattttcatatcttataagtacacagtattatatactatactatactatactatactatactatactatactatactacactatactttattactttttaattggtgaataatgaaatttatggaaaatactttgttctttatcaatattttcattcattgatttcttacataattcttcacattcacccataatatatgaaattcttgatttatcaaattttttacattctaataaaattcttaataaatcacttggtaaatcaaatatttcacttaatgcaattgtccatctctcaataatttcatcctctgttttacttgatataatttcaattataatatcaaatataatcattttattttctaatataccttcttcatcatgtttacctaatatatccattattaaatgtccatccctttctaaactttcaacaattttattttcaaatttccttttataatttaaaacttttaaataatttaataaaaaatcatctgttataaaatcaaataatgaaataaataattcaggatatgaaaaatcaataaatggcataatatattcttcatcgattatacgtaatatactttcaataattgtacttgatttataccatgatttattaaaatttcaattataatcattttgtaatcttcaattgataaattagataatttttgtaaacaatatgtacctaagttcaattgaatgattagttgcaatatgttttaattcaattaatttatgtttatgaatatcatttaatccctctgttatattatcaaaatctctctcctaatgcatctgttaatgtaagacaatcatttgataaatttgtaatatatcttggtaaatatccaatattcttaatttcttcatctttattaatccatttgaatagtcattttatctaaacttctaacccatttctcttggaaacttctcattatatcattggcaaaaaatccaaaatattgaactaatattgttgcatcacctaatgttctaatactcttagtatttgatgataaaattaacataatatcttgtgctgattgaaatgataatctatcctctttacgatcacttggttcttcattaagtgattcaaatttatcaattgatttatttaatgcagtttcaatccatttattagtcgatgaaatattttcttgtaatgatttattcaataattgtttcttcttatcttctgatattagtctaatattctttaattcttcattcttaaatttaaataattttttcaattgggttctattttcataatctaaatctaaaatctcagctagtttgatattattataattatcattatcaagtatactattaataaagtttctgattgatgattgatgccattcctaagatttttgggaaaaaattccattcaactgggaaacatctatcaattgcaattttaaaatcagaaattgtttgataataaaaacttccttcactgcccagaaagatggaaataccattattttctaaagtatctagaattttatcttcaattgtcttctgaaataaatcttcaaatattgtcttataacctctttcacgacttcttttaactttagttaatctattatcactgatgttatctatattatcatcattaatatcttcatgattaatttttttcttctctaaaagatgattccataatctaactttcaagtcttctctttcttcatattgaataattttaatgactttaattaaataaccaaaattttcacattcaacgaaatctaatattgaatcaactataatacttagtaattcattgaactttaaaacacattcattcaattgatttgcaagtttatcaaccaatactttagtttcattaatttttgatttatttgtacattatttgcatttgatcttgtaaatctcttagtttattcaattcaaaatgtgcaattaataattcatcacctgttgaatattgtaattcacctctttcatcctttaaaatttcattatttaaagtttgaagtataatcttttgttttgtatcaaatgttgaaatattattataaacttcttcaattaatttaatatttttcataactaatgcagctttatcaaatactttaaaatcatttgagctattgtttaacaaattatcgttacgtaaatcatctaatttctcaactgtatactttaattcttgtagattcttattagcattgtgcatatcggatatcattaaatggatttgttgtaaatgtcgatcttgttcaatattaatttgcgaatcaattaaatgtttctccttcgttatattagaaattatgttttcaatgttatttaagtcatcctcattcttcaatatagttactcaccttgaccagtaactcattggatatcccagaactcatcttgtacactgaaaagcaaccagatcctggaataatgctcagcgcagactctccctctgtatatagtaaacaatcaaaatttcaaattctataagattaaaaaggtttcattacgtaattatctatactaaggttctatacaatggcattaaattaatattagttaaaagagtgtctatatcatctaaaggaattgacctttgttgatgacaaatgcttcaagagtagcaattgcagcatagagtctattttctgcttctgggaaaacaacagaatgatcggagtagaaaacatcatcacttacttcttccttatgtcttggtaaacaatgcataaatttataatcatcctttgctaatgaagttaattcattattaatttggaaacctgaaaattgttttaatttttccttagtttgactttcttcacccattgaaacaaatgtatcagtaactaaaatatttgcatcagttgcagctatctttgggatcatgtgttaattcctaatgttgcacctgtttcatttgttatttttcttgcttcatctattataaattgttccatttcaataccatttggtgttgcaatagaaacatttataccaaatttcattgctgcaatagctaaatcatttataacattatttgaatcaccaatccatgctaatttaagaccctttaattcattgaaattttctgtaattgtaagtaaatcacaaattgcttgtaatggatgatatctatcacataatgaattgataattggtactgatgaatgttcacataattgttgaatatcagcatgtgaattaactcttgcaaatatacatgatgtcattgatgaaataactttagttgtatcataaaatgattcagttaacaccaagttgaatatcttccttacctaaaaacattggttgtgcaccaaaatatgctgcggcaccttcacttgaaattcttgttcttgttgatcttttagtaaataataatgctgcaagttcaccttgaagtggtaaagttgctggcttttgttttgatttaataagttttttatgatacgctgctctgttaactagtgatttaaattctggtgttgttaaatcggagatagaaattaagtgtctaatagtgttagatgctgtcattgtacttgtagtaaatgttcttgaaattaactttggaaaaagcataataagatattaaaaatgtgtgttaatcaataaagagaaaatttaaatctccaaaagaaggaagaaactaaggtttaaatagataaatttcaaaagaaaaggagtgaaagaaactgtaggtattatgactattaattaaattggaaattaaaaaattccagactatatcaaatttactgcaaaatgaactgaaagttaagcgctttattgtgtgggttgcctttttaggtaattccacaagcgcgcttaattttaattggcagattcaaatgacattaaacggctattttgattgtattatcaggttgtgtttactgtttttcaagaactgagtcattgtatggacatgttgggctttcttttccgataataagttatgttcagattgtaattgttttactttttccctttgttttataattaaattatcaaacgacgtcatcttgttcttcattacttcaaattgttcctcaaatgatattggtgaatgtttaaaatccatacctttctcttcctctttcctatcattactgttcggaagttttggtagaatacctttgatatatggttttggtatatcttcatcttcttcatcttcattcaaactagtttcctttaacgcttgttcaatatgtcttcttctttcaagttcactatctgtactagaaggtatattatcattactcttggattcaaacttatccaccgcacttaaatcttcttcttcaatatcagaaccctctattattatgccttcatctattttctcattattcactacatcttctgtactatacattttcaaatactctttgatatttccgctttttgtttcatcatcatcatcgacactgctatctttattcagtagattggatatactttgatgttttcttttaaatgttactttaggtttaatcagtatatcttccactatttcatcatcctctagaggtacactaactgattctttatttgaactttcagtctttggttttctggtcttaaatttattaagcttgggtattggagtaatcacatcaatgtcttcatcttcatcgttcaatagaaaggataatttggacatggtattactgtatgatataagtttacaacacctaaacaacagcagtgtcaaagttgaacattcattattgttagtagcgctttactgaatttctttcttaagtaaagtagagtctgaggtttattatcacgggtaatttatctactattttgtgcacttctaactgaatttcaaataggatattagagtagtgttataatgggtacatgtggttgcttataatatcagaagatcaaccaagaaaggtcatttccaactgttaatagaccgttaaatctcctctgcatactaactcactaaacaggctgtgcactaacaaattttttaatttttttcaacatgaaatctgcaaaacatttttttgaattcattgatttctattttcatttcttttacaattttacctgcaatatagatagtaaaccaattaaacaacactaatttttcaaatgagtgatacatttgctgatgatattccagcatctgccaaaaaaatgcatcattttatggtttcaacaggtaaatcttcatatacccaaaatgaattaattgaatcattaaaattatcaaatgttgctgaattaatggaaaatgcacaaattttacttaataaagggttgttaaagattttagaggcagcatcaactacagatccaaatgaaaagcaaattttatttgcttcaatatctgaacaagaagctaaaaaagttaatgatatgacagctgatgaaggcaattgtttattctcatgttgaagcagctggtagagaaggtatttggactaaaactattaaagcaaaaactaatttacatcagcatattgttttaagatgtcttaaatctttagaaactcaatcttatattaaatctgttaaatctgttaaacatccaactagaaaaatttatatgttatatcatttaacaccttcaattgatgttaccggtggtccatggttcacagattctgaattagatactgattttattgattctttattagttgttatttggaaatttattgcacagaaaacttatccaaaatgttttaaaaagaaaggttttattccaaatggtttaaaacaatatagttatccttgcacaaattataactggtatgggttcattgcttccttcattatctgatgttaatgattttatagtttcatcaggtattacaacaattgaattaactttatcagatgttaaatcattatgtgatgtattagaatttgatgaaaaaattgaaaatgttggtggtacatataaggcaacttggcaaagtgtacttgaagctggtggatggtaaaatagaaggtgaagatgtttatgctcctttggataatcaaatatttaatataaatgataattatagagtattggatacttcattaaaggatgaaactgatgaaaataatacaaataatgtatcatcaaattcaatgttatatttagattcatggattaatttataaataagcataacatagctaaaagcataaagtgtataatagtaatatatcaacaaaaaatatagaattaaactaacaaaaatagtaatatatttcaggtatttttaggtttcaaatgaaaagtattgtggtagtcctgacatttcttcaatctcttcataagcaggtggaacaataaaatttagttgtggtttttctttctgcttcaaaatctgcttttgagtgaaagattcaaacaatgaattacccttagaactgtttttagggtgagaaattttcttcagtcttgaaatacctttttaatcattcttgaatccaaatatgtaggtggtggcattttaccaactagactttcatcttttaaaatttccacttctgcatcaagtgttaaatcaactttatccttcttattaggaccttcctgtaacaatttagaagttttcctaatcatatcattatcttgtttttctgctcttgaattatacattattttatcaacactttgagatcttgatctcatactatacggtacttattagatcagattcatcagttattacattttcatcaatacttaattctcaactcttattgcaattttaatttgatgagttactttaaaatgacaaattttattctcctactgaactcgtggttggaattattttaacattaaatttattactttcctttttatcttgaatatcatatcttttatgtaattttggtatctgataatcaaattcccaattctctgtttgattttcaaatgtttcaatatctattgtgtctaataatatacgttcagtatgtgataaacgattatgaaaatgcttttgatcattttctgatactgaaaggtatgatattatattcagttatttgatctaaaaatattttaatagatttcagtttatattttgatggatttataggtaatattttgacataaacttttaaatattcaccgattgttaattgtctattagaaacgaccattttatagtataataaatttctccaattacctagagagagagcatcagaaacagttgttgaaatacttccaaattctgtatcacactgaactatctgtattggtaatttttctatatattgatcttgtgttaatagtgatgatttatatggtgtaactgtaactgtaattgaataatttgaggatccgaaaaatatttgacattgattccggtataaggttaggtattaagaattggaaagggtaagtaaatgaacctttagcaaaatagtcagattctaaaactttatcattctttttatattgccaagaacgtgattgtgaaaatattgaagagaaaaatttctttaacatttggggaattaggtgaaggttgtgaatcaattgggaataactttattgcaagtgtaccatttaattcaagtttaattttagatagtcgtattggctttctaacagtaaatacataaataaccacgtaatggagttacctttttagttgattcatcagatctaaggtataaaactttatcaagcattttaagtgataaagtgaacttactatttttcaataatataaattcactttcatcagggatatcagttaaattcaaatggtgataagactgtatataaggattttcctgaatttaaagagtttgaagtagctgttgaagtaggagttatgttttgttgtgcattttgtagtgagatgttcgatagcgatgatattagatgattactgtatttaggtgataacattattggaaaatgagatgggcacaaattaacattaaatgttactgataaataatcaacttcttaaaataaaagtgaaaaacatcgatatgaaaaacatcaattacaaaaaaaaaaataaaaaaaaacatgctattatgctcatggagacaattaaaatggaatacttctattgagcgcttatcattgcctatttaggaagtataatatgaaaataaaatcatgtgtcttctcggaattttcccacacttttcattatccctcggaattttcccatactgtgaaatttgaagaaatcgatgatgatggaaaagcagctttttggaggggggggctgttagtaatattgattaaattggtgtgtattcggaatctggtttagcatttggtttcattgaattgtgtattgtttactactatttatcaatcaattgtcatcattcatgtcatccttaacttcattaccaggctcgagtggaaaactcttgagaagaatacgtatgtatagacagacaccttcatttttccacatatgatatgatatcataatacaatttaatataatataatcaaaaactgaatactaactatcaattcctctataaagctccttattttttccaacagatcgtgcatgtcgtccaactttagatgaaccaaatattgccttaaatttagaaatttgtgatttagttaattcgaaacaagcttcactacctcgtgaagcttgtattgcagttgttaaattaattaattcaagagatcctcaagtttcagaattagcattaactttattagattatttagttaagaattgtggttatccagttcatttacaaatttcaagaaaagaatttttaaatgaattagttaaaagattccctgagagacctccacctgcttattcaagagttcaaagattaattttaggtactttagctgaatgggttcaaactctttgtaaaacttcaagatataaggatgatttaacttatattaaagatatgtatagattattaagaagtaaaggttatgatttcccagctgttaaaaaggaagatgctgcagttcttaatccaagtgataatttaaaatcaattgaagaattacaaagagaagaaaaaattgctcaaagtgctaaattacaagaattaattagaagaggtagacctcaagatttaaaggaagcaaatgatttaatgaaaattatgtcaggttttaaagaagatgaagcattagaggaaacaaaacaaaaagtttatgatgatttagataaattagaaagaaaaattgatattttaaatgatatgttaaataatgcaactaatactggtactcttaatactaatgatgatactttacaagatttaatttcaactgttaaagtttctcaaccacgagttcaaaaaattattcaagaagaagaaggttcaggtgatgttgctaaattattacaattaaatgataaaattaattcaactttaattaaagtcgcaagtcttaaaggtgaagatattagtaaactacagatttcaaataatgctcctcaacaatctatgaatttaattgattttgatgatgatgaacctgtcgcagctacatcatcttcaaatgttccaaatacaaatgatgcaataaatgacttattaggtgatttaggtggattatcattcgataaatcaagtagtaataactctaattctcaattcggttttggtgcaattaatcttttaggtaccccagaacctcatcaacaacaacaacaacaacaatctccaaaaccactttcaaacttagatattttatcaggtttctcaagtccacaacaacaacaaccagtatctggtacttcatccccattcccacttgtctctgcaactcaaaatcaaccatctgttccaactacaacaaatacaattccatcacaattagatccatttggttttgatttttcttcacctgctgtttccactccatcatcatcatcaaattcattaccattttattccgatgataaaataacagttacttatattattaaaaataaacaaccaattttagaaacaacttttgaaatctctaataacacattcaatcaaataactaatttccaattatcaattgcagttactaaaagttttgaactttctcttaaatctccaaatggaagttcattaaatgttaatgttaagaaaggtattttgcaagatgcaactattaaaagcaaaacaggtgaatcttttaacattgttaaattgaaatttaaaataacttactcttctaatggtgtgcctgttgaaacttcaggtgttgcttcaattaccttataataactacttttccgtcgttgtataactctttagtataatattttttgtaactctacatttagaaaaaaataataatttacaattataaaactaacttaaaaactttatgtatttataaaaataaaatctgattaattagattccggtttattccctgttaaaccaaacagttcatcgattttactcagatcaccaaaatctgcatcattgatattcatatcattatcattaccactattattcgtattattattattgacattattataataagttttattatttgtagctgttgatgatcccggttgtggtgagaacctagttgtaatagatgatgaattcagtctattgaaatgattactattagtatttgcattattattagaaaatccaccttgtgcttgtacttgaagttgagcttgcatttgtgcttgcatttgagcttgcattttagcttgcattttagcctgtgcttgtgcttgagcttgagcttgcatttgtgcctgtgcttgcatatgtgccatttgagcctgcatttgattttgattctggttttggtttaaattagaaacattaacatttgaattttgtgattgcatttgagcttgtaaaatatgttgattttcaatttgtctttgacgaataatcattaaatgtttcctttgttgttcagtcaattttggatttttaattaacatattcaattgctctaatgttaatgaattagcatttttcttctcaccttggtgtgaacttggttgatcagatgttgaagtaccttgcatagattgtgcattaggtgaattattaaaatcagtagatccagaattcatagcattttgttgttgttgttgttgtttctcatattgaagttgtttagcatgttgtaatttagtaatgtatgaattagccagttgagtgaccttacttttctctaaattggggttttgagtttgaatttgatttacaatagcagaaatttgttgatgagataaactgaatttaggtttattaactttcttaacaccatttgatgatgattgagaagttgaatgtttggaaacagatggtgatggtgaagtacttgatcccattttaacattttgtaaaacttgttcaggtgttggtacatgacttgtaccgtgagagcttgatctaccagtagctgtagcaaattgattttgaggtgatgaattcattgattgtgaataagaattggaagcttgtaatctttgagattggacagcttgagaaattgcagaagaagaatatgatgttgttaaagcaggaggagttggaagaagcgtgtgatggagatccatttggatagtttaagttaggatgaagatgatgacattgctgataattgttgaagattgccttgaacattaggtgattgttgcttttgaagttgtgccaattgtctttgcttttgtatttgtaacaatttttgaacctgttcttgagtgaattgaggagttccattaggtgtagttgctctttgcatgttagcattaacttgaatttgctcttgtaatttagcattcaaaatattttggcttcttggagatgccaaggcattggataacttagtttcatgtctcttaccgtcggttgataattgtctacctggtgtttgtgcacccattcttgaaaacttttgattcagattttgttgtgcataattttcttgtaatgctttatctctatcgtttttcagttttgctaaatcttcaggggttggagtatcattctttctaacatcaggattttgtttacgtggttgaggtgttggtttctgttgtgattcacgtttcttcattaattttctcattgcatcaaaaacggaagcccatcttaatcttttattacctctttgaattgaatccattccaactcccaatggcgaaattcttcttttagttgtggcttgaacctgatgtgcactttctaaccattcttttgcttctaatgagtgaatacctttcatatcactgaattgaaatttatcatttaattgaatatatctttcaaaacattgccatggggttcttctttcaatattagatgtatatgaaatagttggctttgcagaaagatgagcagcaataacatcccaattaaatgaaaactcagaaacatatttaatcaagtatttatcatcttgtggtaaccaaattgtaggaattctaatatttaattgggaaataggtggtggtttgggaggtttgagaatattaattcttctgtaaggtccaaataaaccattttcagttttatgtaaattcttatcgttggaatcaatctttctgtaaataattttttcaaattctgcctcttcatcaataggaggtaaaacagcggaaacatgtgaatataattctttttcaattaaatgatccttttccttttcattaaatggagaataatatggtaagttgttgataattgccttttcagctaatagtaaaagcattatagtcagagtagacattgaatggtacaaacctttcagtaacttttttcttgatattcgggatatgtgaattcaggtagtttatctttcgttacaaccaaattattttccatgaccatatcttcgtcatcaacagatttttccttttcattttcagtttcggcttcagtttgggtttcagttattttatctttctcatcttttccaatttcgtttacattatcggttacttcatcaacgccaccggcatttgttgaaacagattcttcaatatctttatcatccagtgtttgagtttccttaatattcgatattgcagcatctaaatcatcagttatagtgttctcattttcacttaaatgcacaattttggctcttttaatgcaacatactttaccataagtccaataatcttgaacagcttgagcaatataaacacattgtgccattttatatcttctttcttctctgaaatctgtagccagccatttaccttccgaaattaaattatcccagtgtgtccttttaccaagttttaaaaatggatcaataagttttctaggttgccttaaagaccagctattttttcttttcaactcttcaatacgagaatataacactgcaaccttaccttcaactaatgaagtttcaaaagcatcagtagtcaaagttttgtgtgcacggagtaacaatttttgtagttgtaatgtttgttgatgataatataattcctgttaatgatcttgcttctgcaactttatgaggctttctttcaggcatcagctgtgaccattaattttctaatatcaagatctttatattcaagatcacgatcagaacgttcatcagatcttttttgttttggctcatgagtatatttggaaatcattgataataatgatggtggatcatttggatcaaattgctttttaacatatacgtattcttcatcattattatttgtattcataaaagaggtttctggctcatttgttgaatttgaatttattggtttagcactttcctgaccagaagaatcagtttgtgatactggctctttttcattttctttcttttgagatttattttgattttgaagttctgaatctttctcaacattttcaacctctttctcatttatatcttgattatcaggtgtttgaactgcgttggaaaatgaatcacttcttggaacagtttgttgtattttaacaatctcttctggtttaggtatggaaacttcagataaatcattactgcagtcgggtaaaacatttttagagacttcctcttttattattgaagctatttcaattgagttaggtgatggggatgattttttagcatcgggacttgcagataatatatttgaaaccttcgtttctaagtaaagatggagattctgatttagattttgcttttggtttaattttttgaaatgatttaggtttactatttgcatgttggagcgggactcgagcttatacttgaagatgaatctgtgtttgatttagatattgtcttggacgcaagagactttagggtttactttcaagttttgaggattgaaaacattttgatttttttcatttagtatttttagaatcaggtttaggttgaatgggtattagattatctgatgaagaagatggtttgacagtattctcaattttcctttgcttcttaggtggttccaaagactcgctactggcacgcttcagctgaagctgttggtttgggtatgctggaaatttcattagttaggtgatgcattattctgttgattgttctgctgttgattttgattattattatgattctgttgttgttgttgctgtggggatatagatttcctaaaaatcttttcctttgagagaaatgatatatcaaatgtatgccctttctctaaatcagttcttttcaagaaaagtgactaatttatcttcaatatgttgaacgtgatcacctgatataggtacaaatggcagtctagctacacaatagagttcagataatttacgttttctttccttaataatttcttgacattctttctttcgtttttctatcgattctagtcgtatacgatccattgagtaagaattcgacttctgctgcattgtctgttccttagtaggagtatctgtaggtgttgtattggacattttgcaccttataatatattattatttagtaaaattttttgtatttaaagctcagttataaattattcgactatataacctctaaaaaaggtctaaaataagcttataagatgtatatagcacttggactatatctgatgttaataaatgagtatatagacctaatctgagctctagggatatatcaatagaagatcggaagaaaaaggctctgttggtagttagtaattaaaaaacaacaacttctcttcaaacggcatgaaaatttctactacgctcacaatactactattttccacttaaatcaacggtttactaatattatactgatttatcactttatatatctttataaatttcatacaagtatctacttcttaaggacaactaaacattgccggcgaagacgacggctacgggtatatttcgttactgagtctttatgtgagggatgtttccatctattatcataatatacccatctaggatgagggtaatggattccattgactatctaaccatttccactcacttttatcaaactttttagttattgggaaacggtaatcttttaaactatttagttgttgttgcatatcaatagaacaatatggtgctttatcaaagaataacatatgcttagaccaacctaaaccaacccaacgtctttcattttccaatacttgaaattccacaattttagtgttttcatcaatagtacctttgatgtctaaattcataattgaaatttcgttttctttgtcaaccattgaatatttttcattagtaagaaaacttgtgatcaatctagtatatttacttctccataaaagtctacgtaatgcaattgaccaagaggaataataagtcgaaaagaaaatacctgttgtaattaaccatacatcaattgaaatacaatttttcattaaatatacgtagaaaggtgtgagtaatatcaaattgattgtcaaaggtgtaagcaaattagaataattgctactaaaatttgaaatgaatgaacatcgtatagtaaaattatccaaagtatctaaaacttcttcaattgtgggtacagattttccattcaaatgaatatttttcatcaatgtaagaaactttaataaaccaaacgtaacaacaaaagcataaaactaataaagttggtaatattataacaaaataattattccaatgtaagatcatcattgaatataacataataatgacaatatttctataatgagaattctccttactacttgtccaagttataaaagatagaatacgattacatgatactaatagaggatataatgaatgtagggcagatattatacttggtggtgtatcctttaacagttgatgattgtgagaatttaatgaaatgtaggatattgatgatgcaggtgtaacaaatgatgcatgaacgtaagattccttcatgatactgtatttatcttcacagcattactcaatgcctgaagttcaatcaactatagctctattaactctattgaactataaagtagtaaaccttgtaaaagaaccacatgtacccatcaaagcagtacgattccccactgtaagcctcccctctaaactcacccgcaccactttcaccttgattttaattttgccttccctgattacagctgatttacttattattatagtgattgcagtgatcttttattgaaagttactattcatacactggtatcactcacatatatatcacacatgtctgcagaagaaagggtaacagaaaaagaacaaaagactgtagaaaaggcacaagaggaacttgtgaaaagattagaagatgatgatgaatttgaagatttccctgaggatgattgggaagattcagaaactgttggtgctgctacataaggctaatctctgggaagagagctgggaagatcatgatgatctaactgatgatttcactgcaagattacgtagtgaaatagagaaacacacagcagctagtgggaaataattaatgatcattgaatccacacacttttacttcaatctttgtataaaactaccaatattataaaaatcaattaatgtacttgatattcaatctataggcagatatactatacttgtaagggtatagtatcctagccttatatacatatacattattactaacacacactgtaagacacgttaagtataaagactggtgtagagatgtagaaattttagatttcctcacattaaattaaatgtaactatttcaaaggcaaattccaatgctttaaaatcgatgatcctttgatagatttgaaaggtttcccttctgaaatatatcagataattgaagtaaaacatcaatatggctactttagaagacttagagaataatcaagatttacagatagatgatgaaattctcaattcttcaactaatgacattaaaaatagaacaaaattacttgataatgagatcaagatatttaaatcagaatatttaagattacaacatgataaaagtgtaagtttacaaaaaatcaaagataataaagaaaaaattaagaataataaacaacttccctatcttgttggaaatgtagtggaattattagatttagatgctgaggaaaatgcaaataatgaaggtgcaaatgttgatttagattctacaagagttggaaaatctgcctgttataaaaacttcaacaagacaaactgtctttttaccattgattggtttagttgaaccagaaaaattaaaacctggagatttaattggtgttaataaagattcttacttaatactagatactttacctgcagaatatgattcaagagttaaagcaatggaagttgatgaaaaaccttccgaatcttatgctgatattggtggtttagataaacaggttgaagaattagttgaagctgtcgttttaccaatgcaacaagctgaaaaatttaaaaatttaggtattaaacctccaaagggtgctcttatgtatggaccaccaggtactggtaaaactttattagcaagagcttgtgcagctcaatctaatgcaacattcttaaaattggctgctcctcaattggttcaaatgtttattggtgatggtgcaaaattagttcgtgatgcatttgaattagcaaaggaaaaagcaccaactattattttattgatgaattagatgcaattggtacaaaaagatttgattctgataaatctggtgatagagaagttcaaagaactatgttggaattattaaatcaattagatggttttggatcagatgatagagttaaagttttagctgcaacaaatagaggttgatgttttagatcctgcattattaagatctggtagattagatagaaaaattgaattcccattaccatcagaggaatctcgagctcaaattttacaaattcatgctagaaaaatgactgttgattcaagtgtaaattggaaagaattagcaagatcaactgatgaatttaatggtgcacaacttaaagcagttacagttgaagcatggtatgattgctttacgaaatggacaatcggttgttaagcatgaagattttgtagaaggtattggtgaagttcaagcaagaaagtcaaaatcagtttcattctatgcttaagtctataaaagtttttactatatactttgtatattataatattataataaataattaatatctaaaatctgaaatcattaattgtacatgtagatgttaccatcataaccagccatagcatataaacttgattcaagtgggatgaacatcaatacaagttataacagaatttgaaatttttaattgacttttaactttagtcgttttccaatcccaaaagaaacatttaccagttgaatctccactgaataatgttttaccatcaggtgtgaaatcccatttgaattgcgtatgcagcacaattatgaccagtgaaaactttccttggattcctcttaaatttttcactttgctttgtactatatgttaaaatttgattatccatactttgtccaacaaaatattgtccatttggatgtactttaacaattggtattgccttttgtttatcatcttgaatatatttaattggcatatttatacgagtatcccaaattttaattgatctatcatctgatgttgtaataaattgtttaccatcatttataaaatcaatccatctaactgaattttcaaaatgttcataagtttgtattatctccccagatctttgatctatatgttcaattttattattatccaatgcaaccataaattcattatcattattaggtaaaaaaatacacatattaggatttgattttaaatcatgtttgtatttaactttcccactttcagtatcccatattctaacctttttatcaaatgaacatgttataaattcactaccatcagaggaaaatttagaatattttaaagctctattactattatgataatctcttaattaattttttaggttttgaaactgaccataatttaaccattccatcagttcctgatgataataagtaatggcctgttttcggtataaattcaactgaggatatagaggaattatgacctttgaatacactcttttgtttcttgggtataaaatattccttttgaccaacaatagttgtagcaaatctaacagcataatcatttgggagttcaaataagtcaaatttagattcattcttaccgtgaaagcgtgatgtttctttaaattcagttttattaattttctttgttgttaaagtagcatctttagaacttattatatcatttgtagattccccttcaccttcaatttcatttgatgaagaatcactactagcccatgatcctttatatccatcaatatcttcaggatttccgctattagtttttatctttttccctgttttctctgctattttggatacattgtgaagttcgtatgatcttttattacgttgaaattgtaatggatctataatttgtttctcaattttagcagcatttgatttagttgatgatatatatgatgaaggtaaatttggaagtgtaatcggattcaaatcagttttatttttctctgatataaccaaactcttttcttcatctgattctgagctataccccgttataagactcattgacccaaagaagagagaacactgttaagacctattactattaagatatgaaaaattgtgcggcttggattgataaaataaaatttcagtgtcaaatttcaaagttgttgcaaatttttaaacttttcttttctacatcaatatatagagtaatactaacaacgaaatggctaaacgtacaaaggaagaggcagaatacgaagattcagatattgatgtttcctcaacagatgatgaagaacttcaagaagaagaatctattgaagaaggagatgagttacttaatgttgattttgatttctataacttaaattcaacagttgattttcatgcaacaaagaatttcttacgacaactattccaagatgattcagtttttttcccattatcagaattaaccgatttaattcttgaagaaggacatataggtacaacaattaaaactgatggaactgagagtgatccattttcaattttaacagttcttaatatatcaaataatcttaaatccaatgcaattcaagaattaactaaatattatttagagaaaaccaaaaagaatgcacaatttaatgttatattaagacaactatttacaccaacatccaaacataaagttggtatgattatttctgaaagattagttaatatgccagttgaaactatgccaccaatgtataatatgttattagaggagatggaaaaatcagagaaaagtgaagaagaatataaatttgattattttttaattccatcaagagttgttaaaatggttgcatcagttgttgataaagaattaaatgatgaagatgaaaataattcacgtaagaagagtaaaaagagtgataatttaccaggtgaatatgattatgttcattatgaggatgaacaaattgaaaagaatgcacttcattatggatattttgattttactaataaaaacattgaagctgatgcaagaagagtgtttaatgattgtggtatagaacctaaactcaatctcatgttaataaataagaaagcactctacattgctgttaaacaaatgtcagaagtattcccttatgaataatgtacccactgtaactgtatattacactgtataagttcaaaaccccccactactaaatttccgaaaagtctgaaaattgcgagacaaatacagctaagaaaaaaaattaatttttttctctatatcactattatgagaaactctcccctttttgtaagctactagcatgaaaaaaaaattattttgatgatttcgattctacaggatcaacagtttttgatttttaattttgattttgattttataaaaccttcacattaattactcttttggtaatagttgtacttgtaaagaagatcgattattgattgatattactttttgttggtttatttatctcttttctcgatctgaaactttataatgaaacaatcagttactgatatctctccaaagtgtattacaggactagaattcggtgcattatcagatgcagaaattgttgctcaatctgagacggaagttttcactagaaatttatacaatttagaacatggaagaaaacctgttgaacatggtgctttagatactcatatgggtgtctctgcaaatactgctgaatgtcaaacttgtcgtggtaatttggcaacttgtcatggtcattttggtcatattaaattagctttacctgtttttcatgttggttattttaaagctacaattcaagtcttacaaacaatttgtaaatcatgttcttctgtccttttggaaaactcaatgaaagaaaaattcttaaatgatttaaaacgtcctggaattgataatttaagaagaatgagaatactgaaaaaaattcaagatcaagctaaaaagcaaagaagatgtttaaaatgtggtgctattaatggtgttgttaaaaaagcagcagcaggtggtggtccagcagctcttaaaatcttacatgatacatttagatgggttggtaaaaagggtgctccctgaaaaggaagattgggatgatgattttgatagattattcgatgataatccagaattagaaaaatttgctaaaagatgttttgatgatttaaatcctttaaaagttttaaatttattcaaacaaattataccttcagattgtgaattgttaggtttagatccctcaagaggtggaagacctgaaatgtatatttggagatatttaccaactcctccggtttgtattagaccttctgttattatggcagatgcctctaatgaagatgatttaactgttaaattaacatgaaattgtgtggacttcttcaatgattagagctggtattcaaaaaggtatttcaattaattctttaatggaacaatgggattacttacaattagcagttggtgtctatattaattcagatattgcaactcctgcaatgcttcaaaatggtggtactaaagctgcaaagccaattagaggtttctgtcaaagattgaagggtaaacaaggtagattcagaggtaatttatcaggtaagagagtggactttttcaggtagaactgttatttctcctgatccaaatttaagaattgatgaagttgcagttccggaattagttgctaaagttttaacttatcctgaaaaatgtacaagatataataagaaaaaattacaaaaattaattataaacggtcctgaaaaacatccaggtgcaaattatttacaaaaaaatgatgaagaattgaagagaaatttaagatatggtgatcgtcataaactggcaaaatctttaaatattggtgatattgttgaaagacatattgaagatggtgatattgttttattcaatagacaaccttcattacatagattatccattctttcacattttgctaagattagaccttggagaacttttagattaaatgaatgtgtttgtactccttataatgccgattttgatggtgatgaaatgaatttacatgttcctcaaactgaagaagctagagctgaagcaatgaatttaatgggtgttaaaaataatttattaactccaaaatctggtgaaccaattattgctgcaacacaagatttcattactggttcttatttaatttctaaaaaagattcattttttgataaggcaacacttactcaaatgttggcatcaatgtgtgatggtatgattgattttgatttacctccacctgcgattttcaaaccagtttatttatggactggtaaacaaattttctcattacttattaaaccgaacaaaaattcaaaggttgtcattaatcttgatgcaaaatgtaaaacttttgttccacctccaaagggtcaaccaaatgaaatgtctccaaatgatggttttgttattattagaaattctctgattttatcaggtgtcatggataaatcattattaggtgatggtaagaaacattctgttttctatactattttgagagattatggtgcagttgaagcagcaaatgctatgaataaaatggcgaaaatgtgtgcaagatatatgggtaatagaggtttctctattggtattaatgatgttacaccaaaggatgatttaaaacaaaagaaagaacacttagttgaaatcgcttatgctaagtgtgatgaattaattgaattgtataaaactggtaaattagaaactcaaccaggttgtgatgaagaacaaactttagaagcgaaaattggtggtttgctatccaaggtcagagaagaagtcggtgaagtttgtattagagaattagaaaaatcaaatgctccattaattatggcaacttgtggttctaaaggttctacattgaatgtctctcaaatggtggcggttgtcggtcaacaaattatttcaggtaacagagtccctgatggtttccaagatagatcacttcctcatttcttaaagaattctaaaactccacaatctaaaggtttcgttagaaattctttcttctcaggtttaaatcctccagaattcttattccacgctatttcaggtagagaaggtttagtcgatactgccgttaaaactgctgaaactggttatatgtcacgtagattgatgaaatctttagaagattttagtgcaagttatgatgatactgttagaaattcaagtaatggtgttgttcaattcatttatggtggtgatggtttagatcctttagatatggaaggtgatggtgtcccagttaactttaatagaacttggacacattcttactttatcactctcaatcataaagagaaagctcttaaaccatttgatgttagaaaattggttaaatctattttaactcctatgaaggaagcattaattagagttgataatgttggtaatgttgttgctcctgaagattttgataaaattgaatatgtcgatatctatgatgctgaaagagatttctatgattctattttgaactatattgaagaaaaactatcattactttgtaaatacagaatttctcgtggtttacctccttgtaatgatgaaaatgatatggatgttgatggatctaattatgatgaaattaaagaaaagggtgttgatcaagttttaaagattactgaaactatgattaagaattttgttgaattatgttgtaataaatatagaaaggctagagttgaacctggtactgctgttggtgctattggtgcacattctattggtgaacctggtactcaaatgactttgaaaactttccattttgcgggtgttgcgtccatgaatgtcaccttgggtgtccctcgtattaaggaaattattaatgcttctaaagttatttctacaccaatcattaacgctattttagtcaatgataaagatgaaagagctgctagagttgttaagggtagagttgaaaagactctattggaagatgttgcaatgtatattgaagatgtttataaggaaaatcaagctttcttacaggttaaaattgatctgaaaactattgataagttacaattagaattgaatatagatcaaattgcaaatgctattgtgctatcaaaacttaaaatttcaagagctgatgtttcaattactggtaagaataaaattcaagtccttgttaatgatgtagctggcgattataaaccaattggtagatcttcagcatcgaaggaaattgcatcattagctagtagagatccagatgaacgagaaagactagaaagaaatgcattattttttaagatgcaacaattgaaacgtttattaactaaagttgttgttaaaggtctaccagaaatttccagagctgttattaatgttaaagatgataatactaatggtttattaattgaaggttatggtttgaagaatgttatggcaactgatggtgtggttgcaacaaagacaagaactaatcatattttagaaatttatgaagttcttggtattgaggcagcaagatcaagtatcattaatgaaattgattatactatgggctctcatggtatggcggttgatcaccgtcatattcaattattaggtgatgttatgacatttaagggtgaagttttaggtattactagatttggtttagctaagatgagagattctgttttacaattagcatcatttgaaaagactactgatcatttattcgatgcagcattctacatgaaaactgataaagttgaaggtgtttctgaaagaattattttgggtcaaactatgggtattggtactggtgcatttaaacttgcagctaaggaatccaataaacctaaaaaggtgggtgcaaaggaaactttgtttgataatttgtgtaaaggtattattcctaagtccatgcaagttgcataaatgaaaaaaatattttatagaacttttatgcattcttgtttcttcctttacttttttaaattgctttcaccgtgtgtataattatattaaaattgaattttttgttgttaatttgattactgtaaaattcggaaataaattaaattgaattgaattgaattgaattaaaactatagtaaaaattggtataaaaaaggtattgattaacctgaaagaagaaataaaatggaaaagaaactacaaaaaataaatagacactttgaattaaaagaaaaaaggagaaaagcacaaaaaaaactagttgactaaaggtttagaaacggtcaaaattgcaccattttctaaaacttcagtatccatgatttctaaccaatcgtttgattcttttggtttaacccagaaaattccatcatcatttttaagcagaatggatttaccgttaaatgttgttaactcaatggaatgacttgatgagtcaatatcaaaggattttgtttcagcaatatgtgattcaacaaaattgaaaatgtttctttggattaacatatcttcttcatcttctgatcttgcattctcaatatcttctgggaattgccatggttttttgttaagactttgaattgcttcattattaggagcaaaaataatcaattgtttctttgatgcttcttcactttcagcctttacttcagtaaatttctgataaagatccggaaattcacgtaagtatttaaagaaaagaactaaatcttctctttgaacaagagctgtagcaatatcaccagttatttgggtataaaatagaagcatctacatttgaatctgcactttcaatggaatcaggaataacaaatttgtcctttgcttcaataactggatcaaacgatttttccttgaaagtattcaaaattggctgatactgatttcaaatctaatttttgtttcattctatgacaaccttctttattttcttttaatttaacattaatactgttgtcatctactttgtcaatactacttgcagtatattcttcatcaccaattaaatatcccaaatttaatggatcttctagtagacttttaaaatttaagctttctttaggtatagataatgaaatgttgaaaaagttgctaatgtctcttttaactaaatcagaattttcatcaataatcagattgatatttacaacatttttagcatcagcctctcttttttgaagaagttcatcctcatcaacaaccatattaagtgtgaaaacatttttaccatctcttttttctaaacttgcatcatcaattattaagttagtattaaaaacatttttaccatctctcttggttaattcatcatcatcaattataagatttgctacaaagacattttttgcatctgcttttgcatctctcttgtgtaatttatattcattttcatcgataaaaagattcagattgacgacatttttagccttctcttttacctaaattgaaatcaccttgttcaatttcaagaacagcattctttacctgttcaggagaaaaattgacatccacaacattcttggcaacagcaactccggtaagcagtacaatcactgacgataaaacacttcttgataacttcattgtttattatatatctctgtctgtgttatttgatattaaagataattcacaactccctttacaatcaatcagctgcctgtaacattcaaattgttttacttaataatactacatcagccccttaaaaaattaatatgtcctaaaacgacgcgacgaatgaatgtagattaatttatccttttaggataagaaggtaacaatgtttagcattgaagagatcattctactggtagtaaggaaagagatggtatcggactctacatttagttatatacatatgggaacacaggatgctatgattttcattgactcatgggaaaatcaggaattaaaatgggatgaagtggagttttcaaatgttgaagatgtagatcaacatgataatttactagaacaattcctttctcaacaagaaagaaccaaatacttctatgtcattggcacctaataataatcctatttttaactcatcctatgcaaatagaatgaaacagaaaagtaggaaattgaattggaaagatgttgatatagattcattcttaacacatgctaaaaataagaatggaagtagtaatcatatacatgatcaaacaatattgaaaaatcctaatttggatggtttttcaggagatgcagaattggattcaatgttagggctgaatagagcagtacctataagtaatggttctatgaatgatgttttgattgatattgataacttacatcaatcaagtttgaatttagaaactgattttgaaatggataagaacaacattgatattgattataatattgataatgatatggcagcatcagctttatcgagaaatattttaaatgctgatgtttctcgtagtttttcacatcaattcactacacctgttgttaataatccgagtttattcaaacaattatcaaagttcaataaatagaaatatatcatcacaacaaagaagacaagttagtgatactagtatgagaaatgtaagttatcattcaccaagacgtgagaatattcgttaaattactttttttttagttatacaaagtgttttttcgtttatacattcaatgtcaaaggacaaggatacatacttaaataatgaaattgttcctaatcagaaggtatataaacttgtatgtttatccaagtatttgctaattatttccaacatttatcacataaaccaatgataaatgaaaccatcttacgtgaaatataccaattttgatgaattatatcaaatgtgacattagaaggtgaacatccatatgccaaatgtgttgccattacaatatatggtacatcagtataatcaggaattatcatatttggatctctcgtataataaactatatttagctttttattatatttaaatctttgattaatccatcttcttgaagatgttaaatatctcattgttcttgtatttaatgtcacattatattttttaattttatctttcaatgtatttgttgcaataataccattttctctcaaaatttcaagttcaatttgtgatggtccataaattaaaaatggtggatctttgctaacatttgaagttttagaaaacaattcaactcttgaccatttatcaagcagtaatgcttcaacttcattatataccttggtatattcttctactatttgtaacattttatttttatcataatttatactttgttttatagtttctaaattttctaacgtcactattggtaactttgaatctcccttagcagaacttggaggttcagttgatgtagattttgatctctgttttgataaagattttattttcattgtatcattgagtttgattttctttgttggtaaactgtgactattactattaccagttgtattgtttttaaaatgaatcgttattttattgaattgtgaattatttccatttttatttgatccattattattgtggttctttgtattgtcattatttataaattcagatcttattcttgaatctgcacttcttttccttgattcacctttagaactagtattggatgtctgtaataattttgctttctttctggatagtctatcatttaataaacgaatgtcttctagattcatcaaaggtaaagctctagttctagttggacgttgattctgtgtttcgtttaatagcagtgagggtaaattattgggtataatattaaaaccagattcttgataacctttaataattctttgaatatttctaacagtaattaaatctaagccttttatatatgaactctgtcctaaaaatctatagctaaacataaagtcctcaatatcctttttgtctgaaatatcaagtatattcaaaattaaaatttttaaaacattttgtgatctgtaagataatttatcatcaaatgatggtaaggggcttaattgatagaattccacatattttaataatttactgaacttgacccatatcaaagtccaatgattttttaattttattggtaatatgaaagatttaaatctgagtgatggtattatactcccattatttgagttatctacggttttaattgaatttattgatctcttaaatggtagtgtaagttcttttaattcttcaatttcttcaaaatattgtttggttaattcatcaatgttattattatccttatatgtaatatcatccttactatctttaaatgaattttcaacttttttggaaaaaataggtatcgatcaacaacataatttcataatctgaaataatatcatcaccatttttctgataagtagagaatgcaacatcctgtaaattgatattacatatttcagacatcaattgttttgaatcaactggttgatcatctctaaatataaaatcttccatgctatcatctttaaacatatctcgattctgtctttgtctgaatttatgtttatcttccaatccaaaagcacacgaatacactcgtaccaaattattgggctgatccatttcttcaatatgatgatatcttaatatatagcttgttaaactagcaaagaactgtccaatagcaaatacagttagttatatacaattatacccaatggtagcaaaaatcacctttggaaataaaataatctcttaggttaccaggtcctgacgaaatcaaccgaaaaatattaagtttttgagacaatgaaatttccttagcttctgctactttattatttattgttgttctttattaaggggtctgctctcctgatagctgttactaatgcttgcggttgatgtgttatagcattgttatactcagtttagaatgtagagtatagcggagattgtttactataatgtctacatcaattattaatttttggttatctatataatctatttacatgatttagtcctttttataaatgatagcagtattaaatttaccagctacaatttcttggtggactttaccaaaatgttttaattgtaatctattattatatttagcaagtttcatcttattatcagaattaggttcaagaagtgatggaatatttgatggaattgctgatctaattcttttaccattagctaattgaccatattcattatcaccccaaacataaacatcgtcattatttaatgttacaacaacatgatttttaccaattgaccaagattttataccaattttctctagtttattatttaattcattaaactctttaatttcatttaaaattttaatctttttcggttcatttgtaccatgaatgaaataacctaaacctaattcaccctttaatccatgaccccatgataaataaattttattctcttcagctgctggtaatgattcaaaatcaaatgatgaattattattattcttttctctaaaagatttttcaaataactcatacatattatctgatgtaaaagttgcaaatgcggtatcaccacctgctgaaatatcaatacaacgaggaaattcgttccttttaaaatgagttgatgataacttaacttgtgtaggataaggtataatttctgtatcataattaataactgaaccaattgcaccatgagtatttttaccaaatgcccaaatacaacctgtttgatctaaacaaagagtaaaattatcacctgctgcaatttgtttaatttctctatttgaaacattaccatttttcatgtatttgtttaataaaataacatcatgaacttgattaatagttggaggtttatcaaattgtgaaaattcaggtaaaccaaattgaccaaaagatttttcaatttttgtattaaaccctgttgcgcatgttaaaactgaacctttcttattcaaaagtactaaatgttcaatacctgcagctaatatcaataattttatttgttctttcattaattggcatacttaatttaaaataattaactttataattacttaaccaacctttttcaatattatcaatttgattttgcatttctaatgattcaggtaaatataaaacttcaccattttcggttaatgtataaatagttttattactaatttgaactttctttaaattttttaccctttaaagttgattttttagaattttcaatattattactaaatcctaacccccattgatataaatcaccattttcgtcaattaaagcacctgaattttcactcattacgatatctttaacaataaaattatcaaatatatctaatctcttcaatacaggtataaattcaaatttttcatcagttactaaattactttgattattaccacaaatatagacaccaggtattgaagaatcatttggatttgttatatttttagtaaaattttcaagatttaattgtttcttctgctttttatcctttattctttcatacatttcatcaaatgattctaattcattatcaccaatataatttgatttaataaaactccaattttgataaatttgtaatccaccaattgttgtaattaatgcaactaaaccaccaattaagagtttatatttttgagttaattgcattgttttatcttcattatcttcattattatagcttttataattattttgattataattttcattacttccattggttgaaacttgaatttaacatattatatgaattttcaagattttgcttttgaataaattcatatttcttcttgtatatatgagagagtgtgtctgtatcatctatgtctgatgatggtgttttggcatcattattattcttggaattattcttggcatcattattattactatgcaatacatttgaagtaatggatataacgatactttccaagactagaactcagtcgtaaagaccttactgaagagtctagtaatgatttagctactctattatgcatagttgtacttaattatactaataaatcaactctttacaaagtgtattcctactctattcttaatgtcagcattaagtgattggtaattattatgctaactaagtgaaaaaaattcgctaatcctgtctctattgccagagtacttccttccacgggggaagggttcttactttgtgggtacttactccattatactacaagaatacttcacatacgtatacagatagtaacacaatcataatagcaattcatcagaatagagaaagcacgatagagataccccagagacagaaaagtgtgacccagtgggagcggaaggagggccagtccttaagcgggagaaaattatataccatggcatggtctccaggtaaatcaaatctccagatcttctcagactggtgaggaaaagctcgtgataatctggggttaaaattaaggagtattgctatatgtgtcactttgtggtgtgctttccttttgattgtgcttgccacctcctcgagttgtttactttacgtgataatgtgtacctgtgtggttgtgtataaatagttgtgcttgtgtctgtattttctgtagtttgtagtttctggtttgtaacttactttatttacttatttatttattttttttattatcaccatacaaacacaaagcaaacaaatacattatattatattacattaacatatacattaatatataacacgctacaaacaaacttacatacaagtaattgattaaaaaatgaagaagaatatttcaaagaagattgaattagaaccaagacattttgatcatttaactaatgaaccaaaagttagaaatgcaaaagaggtaacatttgatgatttatcaaattttgaagattatattaagaatgaatcatgggatgatgaatatgatagtttaaatgttcatcttgaatatttaccaccatttattcaaaaggaaattcattcagatgaatcaaagattaaacctcaaatgaatgtattaaataaaaaatttagaagacatttacatcaacatttaacaaaacatttattacctgaaattaataaaatgactggtattaattatgaatttaaagaatttgatgaaggtttaacacctgaaatgaatggtattaattctgtttataaatggcattacgaagattctggtaatcatggttttgaagaagcagattatgaaaatagacatcattggaaagctcaattagatattaagtcaaattctaatggtccttatattaatattgactttaattgctctccaatataataagaataatgataatgatgatgattatgatgatgatgatgatctagttatcacattacattttaaaaaattttatttatcttatctttttaacattttataaattacaatatatagctatatttaaccaacttaatgaacttaatgaacttaatgaacttaatgaacttaatgaacttaatgaactaatcaatattattaaagaaaatacacaattattatgtaattttgatattgtgtaactaaattagtaaattatataggataaagaaactaaatagagacatagcaatgaatcactcactgtacatttaacaggaacagctttgagcaggtttttcttcattataacaagagcatgcagttttcttacaatgtgcacaatcacatccaccttcacaagcacatgaagcagtaggacaaacacatttggatttatcttcagtacatgaaccacatttacagtcaccttcacattgacatacctttggacaggaacatgtattgatttgagttttaggagtagagcattcacaggacatttttatttattgtttgtttgtttgtttgtttctttgtttgttgaataagttaatataatttaatgcaagaaacacataactgaaaaatgggaagcttaatcaatttaaatagacataattgagctttatttgcctaaggtgatagtcctaaaggtgatcaatcttatacatgtaatagtatatcttgggcataagtaactcacagtaaaacttatcctggctaatgtaacgcattgttagaaatttcaatatcgataagagctaaattaactcaatagaaaattggaaaaaaaaattaagcttaaaagcgataaatgacagtggaagataagaaagtattaaaaaagtgcaaaaatatattggacgagaccggagtcgaaccgatgacctttcgcttgcaaggcgaacgcgctaccaactacgccacacgcccaaaagttaactgatccctagcaggatcgaactgctgatcttggcgttattagcaccacgccttaaccaactgggccaagggatcttgttgttggtttttcagccatgaaaaacaaatttgatgcccaatcaaatttttttaatcacgtgacaaacaatgtttgaaacttgtttttttaatgtggaatactgatagaagattgtaatttaactagaaatatcattgatttacaatataatatagtgttttttacaatatatctactatatgatgaataatcattgtcgtacaagtcaaatcaaacatgtaagcatcagactgttgaaccatcactcgtactaaaagccctttccgaaattcggataaaatttaaagtgaaaaatcaaaattaagcgaaaaaagggtacttttctcaaaatgcaaaaatttttttcaaacaaggacttttcatcttgagacactatacatcatcattctagagtgttcgattgatgaggcatagaagaaaatctgacaataaacgtaataattaactccaggtcactaaatcctctcttttattttttaaagtcggagttcttgttaattccgtctagcaatggttacttccacaccccatgaatagaaatgttatataattaagacgtcatcagatgtaaaattaaatccgcgtaattccgttattcccataaaatattttaaaagaccagaacttgtaccttatctcactcagcatactatttaagcttaacatttgacattcgaaattattaaccttaaatttttcctcttcttctttcatcaaaaaagaactattaataaaaataaagaaatgtctacttcatttagagcaattggtgttattgattacaaggattggttaaatccaaaagaattcacatacgaaccacaagatttacgtgataatgatgttgaaattaaaatcgaagcatgtggtatttgtggttcagatatccatgcatgctatgtggtgattggggtgaaccatatgctccaatagctgttggtcatgaaattgttggtaaagttactgcaagaggtccaaatgctaagattccaaattggtgatagagttggtgttggtgctcaatgtgattcatgtcaatcatgtaaacgttgtgaaaacggtaatcaaaataactgtaaaagtatggttggtacatatggtggtacatataaagaaactggtaaacattcacatggtggttacgcatctcatgttcgtgttaattctgaatttgcatttaaaattcctgattcaatggattcaaattatgttgcaccattattatgtggtggtattacagcatttagaccaatgatgacttatggtgttaagaagggtacctagagttggtatcaatggtattggtggtattggtcatatggcaattttatttgctaaggcattaggtgcagaaggttacctgcaatttcacgtaatgataaaaagaaagaattagcattatcattaggtgcagatcatttcattgcaacagatgaagaagattttgcaaataagtatgaagattcacttgatttattaatcaatactgcatcatcatttagtgaaacagcagttgattcagttttaaatttacttgcaccatatggtcaaatgattttcattactgcacctccactttctgataaattaactcttacaccattccaaatgttactcaataatatttcagttggtggttcagttattggttctccaaaaggactattgaatatatgttagaagttgctgcaaagaatgacattaaaccagtgattgaaactttagatattaatgaagaaaatgttaaaactgcttgggaaagaatgactaagggtgatgttaaattcagatttgtcttaactggttatgacaaatatttcggtaattaatgagaaagttagttttgcaaaattatatatagttcagttttctagaagttttatactattctatataggataaattttacattcaaattaaaccaaattatcgatcagttatagaatatattggtctttgttcatattttcattagttttttgaaatcaacttgtaaattcaatatgtaatttcaaacactttacattatcacagaattcaataacttttttatcagaatattttttttaattttttttgatagaaaaatggattttttttaatgaaattcaaaccactaaatattcagttaagacaccacatatcttactgtcaattaagacttgatccctaaaaaattgtcttgttaaaaaaaattttttttttttttccagtcaacttctgtattactataaatttataaaagatactataaatatttttctctaaaataaatgctatataataaaacattcagtccggttaagggaaaggaaaatcctataaaacccttttgttatattgtaaaattaaatgaaaaatgaaaaagaacttaaagagtaaatgaactgatagagcttgtagtttaaaaataaaaatttacaatccttggtcaaaaaaacttgcaaaggacatttaagcaaattgtcccagtgtccgagtggttaaggagccgccctgctaaggcggtgggctctgcctgcgcaggttcgaatcctgtctgtgacgatttttttgcatgctaaatgtcattattttttttggaactcattgattactatgcatctttattatgcatattcaaaatagttttaactcttattgagcaaccaattatcacacttgagacaaaaaactatttcaatctagaatatatcaaacataatcagtgatggagatctgtgaaacttttataccttaacccgttcaatagtcattgaaaggtattcgcgttgaaatattggaaattcacgcttgatctacaaactgagtgtgaagatcagttctttgttgattgatttacatcaaacatctgattctcatatatcaacaagaaaatgaatccacttagaatgattatcatgggtgctccaggttccggaaaaggaactttaacatcaaaactcttgaagaaattacctcaaatacattcattatcttcaggtgatattttaagaagagaaatggccaacggttcagagattggtaaaatggctaaaagttacattgaaagaggtgatctattaccagataaatttatggcaaatttaattcaagcagaattagaacaacaaaaatggctcgatgctaaaacatcatttttattagatggatttccaagaactggtaatcaagcaattgaacttgaatcagttttagtaccacataattcagatattaatatggttattgaacttgatgttccacctgaggttattttaaatagaattgcaaatagatgggttcatattaagtggaagagtgtataatttagaatataatcctccaaaggtaccatttaaggatgatatcacaggtgaaccattatttaaaagacctgatgataatccggaaacttttcaaagttcgacttgataaatattttgcagaattggaacctttaagagagtattatgaaaagaaaggtgtttatgttaaagttagtggtgaaacttctgacattattttccctaaattactctctgctgttgaagcaaaagttaaatcaggatttgtagatagtatttattagaataagcatttgtagataataaactgatggaattttaataaaaatagggcctttttaatatttaggtatggaatgaaaatttgatctcaaaattttttgatttaatttttacggagaagtttaaattgataaaccccttagttcaacgattatatattttttcttttgcatttttgtggcatatacgtttatcgatctaatcattttagttgtctactatatatatcaataaaaaatgatagaaaataaaatattgaagtcccctgttgataaaaaagaaagaggttcaagagcttgtttagtttgcagaaaaagaaaagttaaatgtgatgcaaatgaatgcttttccaaatagatgttcaaattgtgtccagtttaatattaaagattgtgtgatacctcaacctaagaagagaaagagtaaaaagattgaagaacttctgaaaacgaattcatttgtgcaactagttgagagtgaaaaagtcaaccgaggaagaaggagacagcacttctacaagcatcaagtgtaacatcagaaaacaatacaaaatatcctgaatacgttgaaatagatattcaaagaaagtacccagagctgagctccatgaaattaaatccggatgaaattttagggcatgatgttaaattatttggtggatcaacagatagtgttgattggtgttgtccctttacggaagatgtaatctctgaatatgttgagaaagatttgaagaactcatcttcagtcatcattattgatgatcttgattatagatacctgattgatgcaggctgtttcagactaccttcagaagagatatgttggacatttatagattgtttcttcagtaatagattatgccaattccctataatatttgaaagagagttccgagaaaaatataaagatttgaaacaccctccaagtttattactcctacaatcaatcatttactcaggagcaaaattctatagtcaaggcaaactggacaaaggaggagaaattaagacatagggaaaagtgtgatgttttatttaaaagagcaaagatattatttgataaaaggcttgaatttgatacattaacaactttgcaatcattactattattatccaattgtaacaaaagtcgaaatgtgttgaatactaaagttgatgtatcatatgtgaggcagacgcttgattactgctttgtgttaggtattcataaagtacgatcattagatcctaaaacgtcacaatataagatcagtctgttcaaacgattatggtggacaatatttgtattagatacattatattcattcattatgggaaggccatggtcaattgattcagttaatatttcagaaattccaatgatagaggcaaaggatcttagagatgatttagatgatagttctacagacaatgatccaaagacactctatttcatctatagagttaaattaacattatgtatacgaaagatatgtgaaagtatatcgatgataattcattctgatgagaaatattatgaatcatttgcaacatatttgaatgactgtgatgaaatgatgcgtgagtggattgaacaattaccaacatctttactgttcaaggtaaattctgaaaataataatgtttacaatgcctcattatctttggaatattatagtacattacttttacttcatcgtattcatattttgatatactctaaatttaataacgatgaaagaaaaccatcctacccatcatggggtattatttttaaaggtgcacatatggttgcaataatttctaaatatatcatgaagaatgattacatttcatttaatcaaaattttatcccattttcgatgaatatttcaggattgatgatgatgtaccatttatacaataaagataaaaccgttcatgaaatagccaaggaagatattgaaatttacttggaacttttaaaagaaatagcaatttattggccacatgcatccatgacctattattcattaaaatctgtttatgaaaacaaatcaaagcaatctttactgctcaatacattattacttcagcaaaaaatggtttccagatacgttggaactactaatatttctgaagaaatcaatgtaaaagaaagaaaacagaaagatacagttgagaaggaaagcgccagtccactgggaagaaagacatcgattatcagaaattccattgattcaattttaaacacaggtgaaagcactacatttaatgcgcctaccaattctattatgtttaggtctaaagtttcagatgttttaggtaagaaaccagaaataggatcccttaataatacaataaacaaggaaacatcatcacaattacgtgataattcagtaaattcaaatttatctcaaaatacaaagacattctcaacagattcattttcaccagatttaccatcacagaataacatcacagctacaaccgtcccatataaaccactacaactagagatacaccaatacatatcacagaatccagtgtattcagaaccaatcaatccactgaatgttacaaattcatcaagtagcatcatcaatgctggattgaaaaataacgaaatacataggttgaatcaacaaataccctcagttactaatatttctcaatatccaaatggtatcaatttagcaacaacaacacaaagtaatacttacggttatttagatgggaatttgagaaatcaaagtgtcgttgctagtaaactagactttgtaatgccaccagatcttattccaggtacgaagtacatcaatttggcaacctgaatttgatacctcattacttgccattaaaggtggaaatgataagcaaaacattgatatagattttgaccaattatttagagatctgggattttaatccatttaaatgtatattttagagttttagataaatattaataaaagtagacatccacatgctgtattaaggtaccattttaagtaaaacttgatgaacaaatcaacgacagatttttttgttgtaaaaaataatttcgcttacaccggatttaagattcggaacgagaagattaataatgaaaagggtaattataaataaacggtgtcttcttgacttttcatttgctgtaattttataccagtgaaatagattctggacaagttaaaagaacaataatcaatgttggcttctcctaggattggtgtcatcctttctctacaacaagggactgaaaagttgtttgacatcttttaaaaacacgtccgcttataaatacaactttaacacataatatcaagagatcaatattcacaaaatataataacaaatttcaaatgactgatcaacaacaatataataatttgagacaagttaatcagtacaaggtagaatataaaaatcatatctatactgttagtcaggtacgatccgaatctacatcaagagaatccggaaaatatgaatcaaatactgaatcagacactgaaaaaactgaaaatccaaaaatagaaaagaagggttcatttaaagaaattgttgaactattgaagttacttaagggagaatggtccactctttcatttgcatttgcatgtctaatgttcagttcagctgttagtatgcttttcccatcaattatgggtaagattatcgatacagcaaaaccagatgaatctaataatgaagaattaggagatttcgttatacctaaaacaattgaaattttttctcataatataccaataaatgtattctatggttctttgatatgtatctttgcatttggttcattagcaaattttggtagaattgttctcttaagaaaagttggtgaacgtgtgatggctaaattaagagttgatattgaaagaaacattttctttcaatcatccaagttttgggataaatataaaagtggtgatttgatttctcgtttagttaatgattcaactgttgtcacaaaatctgttactcaaaatgtttctgatggtttaagatcaacaattagtggatttgttggtattggtatgatgctaacaatttctgttaaattgacaggttatatgtttttaattttcccagttttggtatttattgccttagtgtttggtagaagagtaaaaaaagtttcaagagaaatacaacaccaattgggttctttaactaaagtttctgaagaacaatttagttttgttaaaacaattcaaagttttaataatgaaaattatgaagttgcaaaattccaaaaggaagttaaaaaattatacgatttatcaatttatgaaggaagattaaatggttatttctattctggtaatggcttcattggtaatactttcttagtttgtttattatctgttggtgtttggatggttagacaaggcgaactctcaattggagagttatcatcatatttaatgtatacaatttacagtgcctcaagtgtttattctttatcaaacttttattctgaattaatgaaaggtgttggtgcttcagaaagagtttttgaattacttaagttaaagccagatattgatccatatgcaggtaagaaaatcacagtcgatggagatatcgttttcaaaaacattaacttttcttatccaactagaagtaatcatcaagttttcaataatttcaacttagaattgaaaaagggagatcatgtttgtcttgttggaccatctggttgtggtaaaagtacagtcactcaacttcttttaagatcatatgaaccaaacagtggtaaaattttaatcaataataccgatttatcggaactcagtttagcaaacttccgtgaacaagtcggtattgttcaacaagaatcaatgttattttctggaactttaaaagaaaatattgtttatggtagacgtgatgtttgtgatgaggatatagctaaagtttgtgatcttgcaaattgtaccactttcattaataatttcccagataagcttgataccatgattggttcaaagggtactcaactcagtggtggtcaaaagcaaaggattgcgttagctagaacattacttttaggtgctaaggttcctcctgaaacactgaagacaattgacaatcctaatattattggagctgatggtagaatactgttaggtcctagtgttttgttgctcgatgaagcaacctcagcattagacgctcattccgaagaagctattaagaaaaccttacggattaagacaaagtgtgggattaactacaatttctattgctcatagattaagtactatcagtatgagtaatagagttattgtgttttctcaacatggtgaaattgtcgatgatggtttattcaataatatgatcggcaattctgatagtgaactaaacaaactgctaaacaagagtttagatgggaaacatacagaatcagacattactgataaaactgaaaaagttgaataattctcacaaatgcaaagattaggttaatatgttactaaagatctttgaaaatggtattttgtaaatatttataggactgaatggagttgatccattttatatatacacaataggaaataataaaatttaataataatctactgttaatttttatcaaattacccttgatagctccaattttatgtgaatcatcactgtcaattatttcccagatgacatagtcatcaccattgcaaaatgttattacagtcgttggccccatcactaactgattgaatgttcagagttgtcactatatgcagaaataatatttttcacaccattagtgagtaggcatccccactcaagagatttatacatgttctcaaatacttcagttattatagaagacggaacaagagttttttttattgaaatcaaagaaatatccaattcgttttccacatccatcattgaagggtatttagaaatgtaagagtctatatttcgttctaaagttaattgcaggaccacccatagatgcatatgataaccattctaaaatttcagccatggattctgattcgttagatattgttaaatcgggagatatacattttttcatttcctgaacatttgacacgaatttcacaggttttactgaagttatgccctgttttttcatatgaataatgtcatcatctacatttcttgtcaatatattttcaaaggtaggattgaaagtgataagtatccaataatacattttcggcaaaccatagcagacgaatgtaatttttatcatttttctctataaatgtttcaaagtctgtcaaactgaatcttccaatgtacatttgtgtattaaaacgactatttccctgtgaaaaagtagatttttttaattttaaacccgattttgtgtatatgtcagatctcaatttaatggttagtttcccatggctgacacagatactgttttcatgagttacatctatgttactcggttattaatttaagaccccgtctaatttctttatcaagtgataaaatatatgatagaatgtgtaataagctactttcaaaagtaaaacctatagtttcatcattttgagggaggtattgtgaaactttctgtaaatctgaagttttcaccacagcacttatcgtgtcaacaaagttatgattgacaaaaacagactttattgcatttaaatcattttcattccttttacctgtgactaatgataaacgagaaaccttttcttctttcattaggtagtgctctttgcgtgtatgtatgtatctataaccttaatgttacacagagattaaaaaatgtgaaatttgaaatattttttttttcatgttgcaaaacacaacaaaaagtcagtcgcgaatatcattagtattattttgagtcatattaaagaaactggaaaaatccatggttacttcttacattactgaaattatattgaagtctatcttcttgttttttattaatctctgactaacagtaacacaaacaaattatatacaatttaaactagagatgggatacaaggttataaaatcacaagatgagaacccgttttccaaaattgttccaggtcaaacaatagttgaaattcctgaattcgaattagaatgtggggatattctttacaaagtcccagttgcttacaagacatggggtaaattgaacgaaaagggtgataactgtatggtaatatgccatgctttaacaggatcggcagatgtctcagattggtggggtcctttattaggtagaggtaaagcatttgatcctactaaatttttcattatttgcttaaattcacttgggtctccatatggatctgcctctccaatgacaactgaccatgaatttggtgaaagatatggtccagagttcccattatgcacagtcagagatgatgttagaattcataaacttgttcttgattctttaggagttaaagaagttgcaatatgtataggaggatcaatgggtggtatgttagcattagaatggacatttgttgatgatggtaaatttgtgaaaaatttggttgttttagcaacaagtgctaaacactctgcatggtgtatatcatggggagaagctcaaagacaatgtatttactctgatccaaaatatgacgatggattctacagtttagatgatccaccaaatgtgggtttaggtgctgctagaatgtccgctttattaacttatagatcaagaaactcttttgaaacaagatttggaagagatgcaccaaatgaaaagcaaaaattgaaaagtacattgaataatatatcagataaaacaaaagaatctgaggaatcatccgcaattgttgatgaatctgaagcacatgacaaagaattcaattggagaattcataatgatggtgcaaatagaaagaaatcatttgagtcataccacacaagtcgctcaaactcattatcatctaacataagtaccgactcacataatactactataacatctgttgcaagcggctgagctgcatagtaataacacaaattcattattacaaaaaccacgctctagatctcgtcgtactcctcaacattatttttcagctcaatcatatcttcgatatcaagcaaacaaatttgtgggacgttttgatgccaattgttatattgcaattactcgtaaattagatactcatgatgttggtcgtgatagaattgaatgtgataatagtacagaaaaagctttacaatcaagaaaacaaccaactttagtgataggtatcagttctgatggtctattcactttgagtgaacaaatatttattgctaagaatatgccaaattccaccttaaaaaaaatagattctccagagggtcatgatgcatttttgttagaatttagtgaaattaatagcttattacttgcattcgaacatgaacacttatcagagcctcatgaagaatgaaggtaattttgaagattggaatgaaacaattgatgaagtaaaggaaagtgttttcggagaggctgaagacgttgcagaatggtagtttactcgacttccatgtacacttttgtaatcataaatctgaatattttataactttacataatttaaattcacaataatctaactatacagcaattgtcactaaagtaatactaatttaaacaatatacaaatctttaaaaattgcagattttgaactaaaccagtaaccacgatccttctacatcgtcactttgttcttcattttccaaatcagattttgaatcatcatttacttgttgcttatgcttacttatactaacttcctttgcataatccatcaaaacataaattgcattaacagcattctgaacaccgttttcacttcttattttttcaccaacttccttagccttttctataattcttgtgttagaagtaacttctttaagtgctttagccaaagatttactatcaagtgatttcaaagcaacaccacaacccatatcttctactcggttagcatagaatttttgatccccaaagaaaggtttgattatagttggtaatccaaatcttaatgacgctccagtagtacccgatccaccatgatggacagcagcatctatttgcttaaaaagccaatcatgtggtacatttccggaattaaaaatttctggtggtaattctacttccaattgtttattatttttatcacctaacctatcagaccagcctttattcagaatacatctcacatccgctgaaagaacagcttcaacaacagacttagttagctccgtaggatcagatacaacaattgatccaaaaccaatatacaccaactttttgttatcttttctagcatttgcaatgaaatcacttaactctttagaaggtttgtaatcgtcagattcatctagaaaccaataaccagtcaccttgacccattcagggaaatccacagaaggcggaaaaacaacaggtgacatgttgtacaagaatggaacactattttgatgcattgcagataaacttgttttacacaatcctaatgtttcaactctccattgattaatttgataacatgtacctctccaatacccattttcaaaagcaacatgtgtcatataattataagcacctcctaatttttgatctggaaccataaatgcatgaggataagctctggtcctggtccatggcatagtaaaagctctgaaatatggaatttgtaatttttctgcaatatgaattccaccaatggatgaaggagattcaatcaatatatcagtatcttgacacgcactccaagatgttaccaacaaatcatcaatccaatctctaaacttagcctttgcctctttgataaaactataattgatactggggttttgaaccattaatgccattaattcggatggatcacctgcaatttgatcaaagtctattccataactcaatatccaatctttgaattcaaggtgtgtaacaatttttaccttgtgaccttctttcagtaacgcttttcctaatgcaatatacggttgaacatcacctctcgaaccaatagtcaacaatgtaaatctgtatgatttttctgctttcaagaaagttttttgtaaaggatgatcttccacaataattggaatgggttcatccatttgactatttattttattttcgaacattttaattttagctgaattaaaattatcttgacttccagagatgagattatcgctttgagataaactagtatttgatttattcttgaaggagtcaagcagtttcagaacttgaatctcacaatcatcccttgaatcagaagaagaaaattcaaaaaagagctcttcatgtcctcttataacaaaaaccaaaccacaatacccaaatctaaaaccactttccttattaatattctcaatatcggtcaatggtaaaatcattatagtacttgagccaggtaaggtagatctgaaacatataactgaattaccaacataaaatttaccataaatcggcaaccctttcatcaaatacgcatgataagttgctactaactgctctttttcattcaatgagaatcttttgataaatcttttctgagaggcatctcttgcccttttatccttcacaaaatatggatcttgaccttcctttgaaatcgccagattttcatcaaaatgtgaaggtgacccagagaaaatcaaattttgagtaaaagatgtaattccttgaactaaagacttagtagaccatctgtggttctcagacgcacttttatttatatcaatctcattggtatcttcatcagattcgttaacctgataatcaacagtatcatcatcatcaatgttgtttatatattcatccacatcattactttcaaggttttcaggataattatcatcattcttttcatctttatttccatctttaccaataggcaataaacccaatgactttagctttttgaatcttgaaaaggaggatgaaggtttccgagaaagaggaacacttttcttactttcatcattatcagcataatcatctgtcaccttcatattttcgatctcatcttcactttcctgtctcttcttcttcttcttcatccgatgaaagaatcagatctctcaactccttgaacttgtttttcttaacctctttaggctttaaattggtggttgttacaaaagaggatgattttttcaaaacctccattttagaattaattatatctgattcattccaatttttttcatcatctttcatcgataattcattaccagaattctttatagcatttttcatttcatttaaagcttttgtaccatttgaaaaaaacattacaaaataatcgtcgactgcaaaagatttaggattttcaattacctttattctcaaatttttagtggcaccaacaacagaagtaagctccaaatcaataatattttgtaatggaatctttatagcaacttgatcacccttatttcttgatgaaaatatctgttttttaattgaggttacccatgatttagcagcaacatgattttctgcctgcatccaatgtgttcgattttcggtaacaattcttatccatacaggagttcgaagatcaatatcttttgatattccataagtctctgctttaagtgcaattctgagatcaataaccaattctgggaagtacatttctttactacttgaatatattgataaagtgtgttctttcaatataacccacttcctatgaattcttagagagtgatatgatttgaacgataacacaccctttctgataactgtatttttattcttctttggtaaaaatgcaaagaatagaatattcttatttgtaatgtaaatatgaccctgtaataatacatcacccatcagccaacatggataatcacttaaaaactcttcagaatcatcaatttgaaatacatctttcaattttttactaattgctaaagccttcttctccttaaaatcttttaaatcatcactatcagaattatcagtcatctttttaacaacagatagttcaaatcttgattgattttgaggtaatactctaattggaacatttgcttgacttcttatcgtatgttgttccgatggaagtggaacagaaatagttgaatgactattcaatgatatattatcatgtgaatatgcagcaccgtaattatcataaccgaattgctcatcatgatcatcatttgcacaattttctgtgtcataataacttgaatcatcactatctattacctgtaattttttaagatcatcaggaataccagaaacagcgtcggtataagttttttcgtcgattgaatcacgatttctcatggattcaacttctctatcttcatcttcaatatcttgaaaaccagcataaacactagctgttgttaaataccctgcaaaacttcttgaaataccttgcatcatagactcagataaatcatggttttcgttgctttgactttgactttttgaatgggatagtttagaagaattgatattcattaagctgactcctgtaacagtatgacgtactggagataatgttttcctagaaatattattaattagtttcgaagaagattgtgtaacttttttagcttcagaagttatagatttacttgaatatagggaaggaaatttaggagaaggtgcaatgctgggtctcaaattcacattctctgcccgattctctatttcatttaagctttcttgatcatcagaataaatactattggaaatatcgctgtccgaaccagtgttaatctccttataaactatgtcatcttcattgaaacttagcggagagtttaattcgttatctgatatcgccatgactatcatttgagtttacagaagaagcactttcctttctcttatgtcttctatgtttgatatttaaatttggggtaagtttactagctgaatgtaatacatgctgtgctggtttgactatcagcttgggtcctgctgtcagtatatcgcttttcttgaaagatttcttgctagattcatttttttctggactattcccactagtagagcctgtattcggttgctccttcaattcactcattcgttattgaattctagtagtatatctgaatgacgtgctttaaagagtatttatgaagaaaatcccctcatcaactgatcgaattgcccttgacagcggagatgaattgatttttaggtccgtgaaaatcaattcaacttcttgtaaaatacagaaaaattatgtaatcattccagaacaagttcttttatgctatatatgataaggtaaatcgatataatacatcagatgacttaactaaaagaacatatctctaagtatacttttatattgcatttacttgttaaaactatatcaatttatgaattgtgtgtaagatgttatacaaaacaaaacttttaccttttttttcccctaattgctctaattcggattattatatttgtacgataagcttttaatatttctacacaggtgatattactatattatacaacggtaaaattcatataaataaggaagctaattaataaattgcttaattattcgaaaatgaaaattatttttgataagttatatagttattctgtcccttttttatattttaagtaattgacacgatcatctacctctaaaatgacttcccttaagtttcgaagttcataagcgaccaaatagaaatgatattaaaccattaataacaccagttgcaaatatgacacacccgaaaaagtaaaataaaattgaagcccagggtgccctgtatgaaacaactgttatcacaggaagaaaggcgactgcaataataaatgaaagtatgaaatgccataatctccattttctttgccattttaacgtcgtattgatgtaatcaccaaccaaattctttaattcactgtatatttggaatttttcctcatttgaaacaaacaccatagtactttcaacgtctatatcatcagattgattcttatcagaattttctagccctgaggtactattaagaaaagactttctaattttgaatgttgctgaataagcaaaatgatcagagtactgatccaacatttggaattttttcagtgaattctacagttgccttaagtggttgtaatacatcacaatcaaccaaagcatagtccaatctacaagcttcatcaggagatctatcagctctccaagtatttaatatagaatcacatgttgtaggcagctctaattatttgttcccaaggatccatattctttactaactctaaatcagttttcccatttatcacttcccaactatccgtaagttttgcaattttttctaaaattttatattgtaatgagccaggtcttgaatttaaatcaccaactaatatcaccccatgacctgcattttttcaattcttccactattaatgcgatttcccaagcttgacaagctctatgtgtttcataagctgcatcaccaaattttgcatatggtgcatgcatatgagaatttaataatgcaattgttgatccatcaaataattcaagaattgtaacggcgacacttttaccaacataccaatcacctctatgaaaggcggatggtctcccattgattgggaaatctatataagaatgtcttctttataggatatttagacaatacagcctagcccaggaccagcaatcataccagatgaaaaccatctacggaatggatattttttacaacatgctttatcaatatactcccaatcttcttttgtccaaatttcttgcaaggcaattatatcataatcattactaatatcatcctcagcggataatctatcagcaattgccattaacctctcctttctaaattttgaaacatatttcaatccccaagtgttgaatgttaatagtttgaacacattttggttttcacattgacttaaaattctctgatcattttttacttcatcattgtacatatccttactgttttcttgcatatactgtatgcggttattgtactccagtttagaattctcatccgttaccaatgttgaccctgtagattgcatctttacaagtatgtctctgcttaggtactcaggaagattgttttccttttaatgataaagttttgcaaaatttaatgacacatgtgcatggtatgggatcaaatcaatttttctcaatacccaaagaggcaggttacccgagaatattttaatttttaatgagccccataaaaattatattaatatttaatttatttcagtctaagtttatgtcattatataaggtatatttataaggtactaagagtatgcaattttttctagttaattaagtaaaatagcaatttgttctttgatatatgattattttgagttagcagcactttttcttaatatcgaatcacttttcagaatcaataatactattaaacatgaaaataataaacctataccacccatgaaagtataggtaccacctaaactcattgaaacttccattttatccaaacaagaaacaaagatagcactcattccacaacggaaaagattatttaaagctgtagcaccacctgaaatttctggaaacatatcaactaaaacagtagcagtaatattaagggggaacatacaaaagaatgtaattaaaaaaatcatcactaaaattactggaacttttataacatgttgaagacaccaaccaaaaacaatagccgccaggcaaactatgattgctgcatatggaatataatataatctcacataaatgatattaaatggtggtatttcttgcatctccaactctctaaatttatcttcatttaaatcttgatttgagttttcatgatgatggtgacgatgatggtggtggtgatgatcgagaagttctttattataattttctaagatagcagcatatttttgattgtataattccttcttctttttatataatttatctaaaagcttccccgataatagtgttccggtgacagtggctgtaccaggagcaaaaaaacataatccaatatctaatgtggaatagtgataatattttgataaatgaacagtcatacttgtttgagagattgtccaaattgaaaagaggatagatgaaggtaataagatataaaacacttgaatttttgagatcaataaaaggggtttccaaggagcatattgttttaaatttttttcaactaaagtttcgtcaaatttaaccaatctatctttaaaagcattaaaattggagctctatgaattggattttttggtataacactcaagttaccgacaaaagcacgatgagtttcaggcaacatagaaaacgcgattgttaatattacaccctgcaagcgcggcggaaaaccaaaaaattgctggccatttccaagcagttgccataacagcaccaagaaatggtgctataccttgaccaataagtgtaaaacctgatgtaagagcatgttaaaccacctctatttcttctagttgtaaaatcaccaacacaagctgaagttatactaattaatggagctaaaaatgaagctagaacacaacgaagaaaaataattaaccaataagttcttgaaactgctaaaccaacatttgtgaccactccacctaaaatacaaattaatatgaccggtcttctaccatatacatctgataattgaaggatataaactagtggtgcaactgcttggaaacataaatatgcagtaacggtaaaatttattcgttcctcctgttgtgtggaaagccatcttcaagttgaggtaatgcagtccaataaatcggcatactcattgcagaacaaataccaatcagtgatagaaacaatgctaatgttcagtcgttccttatgtgtcagaattgtataagtcatcttcatgcaattgtaagttgtttttctaattcataatactgctattgctactaattgtagattctttatcctgaatctgaaatattctctagctgcaaatcattatcatcattagcgtcagtcatattttcgatgacacttactgttcagactttcagtgatagtcaatgagacatttttaaaagataaagatcttcttgttattattcttgtcttatatattcttgtttatagtctttcaaaaagagtcacaagttcgttatctgttgaagatagatctaagaatgaaaaaatacaaaaaaaaaatttaaatttaaacttaaccatggatttttcctaatctttaactcatgccttcggaagagataaatgcgcgtataatgacgggaaagtccgtaatccgtaaagatccgtatgtaaatccaccggcaacagggtatgtttatccgtaaaattaaagtaaacctgtgttcgaattctttggatcatgtttagatttattttttttttactttcacattctggtgagtgcatgaattttgaaagacttggttttcgaaacttgcattaacacatgcatgtgcacatacagggttcactctttagttgtcattctttcttttaaactttactcacattaattcacacaatggtagcagagaaaatagacggtaaacttattagctcaaatttaagatcaaatatacaaaatgaaattgcttcattaaaaatttcacatgcagattttaatccaaaaattgtaattattcaagttggtgatagaccagactcttcaacttatgttcgtatgaaattaaaatcttgtgctgaagctggaatagatggtgaattattaaaatatcctgctgatatatcacaagatgatatgattaataagttaaatgctctaaataatgataaatcagttcatggtatattagttcaattacctttaccttcacaattagatgaagaattaattaccaatgctgttaacgttgaaaaagatgttgatggtttttcagaattaaatattgctgcagttttcaagaaaaattcaaaattaaagattgtaccatgtactccaaagggtataatgtatatgattgattatgaaaaaattcaattagaaggtaaaaatgctgttgtgtgtggtagatcagatattgttggtggaccaatgggtaaattattagaaaagagaggtgcaactgtgacaacccttcattcaaaatcatctcctgatcaagttaaattctttttaaaaaatgctgatgttattgtttcagctgttggtaaagcaggttttattcatggtgatgatgttaaatctggttgtgttataatcgatgtcggtactaattatgttcctgatgaaactaagaaatcaggtcaaaggatggttggtgatgttgattatgattcttgtgctcaagttgcttcaaaaatttcacctgttccaggtggagttggtccaatgactgttgttatggttttacataatttacttcaaactgcaaaagaacaatatggtatataaaattaacgagtagaaatatatattatagaaaaaaagactgtatgtttgtatgtttaattgtttattcatttatttgttggtttctttttgtcttcttagattaattataaattttttaattattttaaatgtgctgatgcattttcatagagagattgccaaacatacgcttcactcaacatcatttcgatatcatcctctgtccaatcttcagttttactagtatcttgtaaaaacattattatatcttgaaattccatgtccattatatgtgatgaaaatctccttaaaaatgcacaacaaacataaatatgaaattgactgaaccccatcggaaaattactgagatatgtatcccacattctgataatcaaatctaatttgaattctctcattaacatacaattcatccacctgaatgcaaattgaataaaatctaaattctccttttcaaaatgatttgacaatcgtggctcatctcttttaattaaatttttaagttcattaatttgtcttataataccaggttgttcatgaataaaattatcttgaatagtatccaaaattttagtcaaacaccaataagtatcagcttcaattatgtttaataattctttaggtaaacattgaggatcaaattcatttacatctattttagatgataaataatgttttaagaaaacatgaaataatggtgtaactaaatcatttataccttgaacataaccactagctggatgtctaactgcccataaataaagaattttctctaaggatgtatgtgtggtttcataggaatacaattttatgcttggattagtacgtaaaacatcaatcttaatttgatgccataatgcctgatctctttgagatttaaataaccttgatatactattcgcatattcttttctctttctactcaaaactgaaagtcttgtacttacatttgtagacaaatatcccattaatatttgccaaactaatgaacgtaatgatgaaggtataccaccccatgtatgcatttttaaatttgttaagtcaaaactagtttgtgtcagtgatttaacaattttattatatttaatcacatcatcaattggtgcattttgtgttgagagaatgacaaatgggtctttcatgatatcttcatagtttttctttaagaaaggatataattcattaacttcttcaggtatttcttgagctttgttactatcaatgtttaaatcatctagacaattaccattactatcaattttaacataatcttcctgcgcagcaattctatcatctttcaatgatagtctatctaaaccataagcttgagaattgttaggtgtattttttaaacttattgtagaattatcacgttgaatacaatcatctaaagtatcatcccaatcatcatcagaatctataaaaggactttcattaagtcttttcggcgtagttttcgataaccctaatttagataatgtatttgaatgtgttctagttattgataatgaactacttgatctatttgaacgtgatgagctcattgatgatctgtccggtgacattgaccttacttttgatcgatctctaactgaatctaaaaaagatttagcatgcattcctggttgttctgcaatatcttttctagctcgatgtgcagatgatggttgtttaggtgatgtatctgaatgtgttaatgcactgatcgccttgaaaaaacctttagaactcgatgacgagcttttcaattcattaccattatttgacttattatttttaccgttcattaaaccgtcattttgaacatccgattcataattgaaagaattgttatcaaagagaaagtctccagaattttgaaggtcctgctatatatttcaattaatgttagtatacagtgcaatatattttaaaaatacaaaaacgtaatgagattgaccgattttttgctaatttcttcaacatacccctgttggttgataataacctttcttccacatcaacagagagtgtatatcttgttaaatggaatatattacaaaagaagatcaaagagttgtggcagtacactatattttatcaatgaaaacctcaaaattcagaacctcactcgttccgcttttcttattgtgatctgttaggttaatcgatattcatatagtgaagtattgaattaagcaaataagagtgaatttattatacagttctatatagcataatcagacatacctaatgaccaaagatcatgagtgtctttaatttggtatgataatgttctttgggagaatccctgttcacctaaaaaggaaagattgtcaataatatcatccaacaatattgctttacctgtaaacatagatcccgcatgccccgtatgatctacattgacaatatggatatgaaaatgataatatgatggctgataatgtacataaagtcgtaattgatcacttgtaataccatcctttgcataaattgtaggaatttcctttaagatactatctcttatacgtgttaaataatcaatatgtgaattatttaaactcctaattgataatatactatcatcataaacaacacaacaacaatataatgattgaacatctttcccatcccatttcatgtcaggtaaaatgatataatcatcatttttaaacagtgcacgttcagcttctgcaccatcatagagaatattcttgacccatttcaaacgatctcccaacatagtctgaatataaggttttacaactttttcataagcttcaggtgtttctctgaccatatgaaaatttgatttttgatatttcttaatatgagtctccgttgctggataaataagagaatatttagatgatggaagattaattaaattggcttgagaactaagtaaaccccagaagtaaatatcattgttagattccgaatgaacatctccaatatatgaattaacaagatctttttctacaagatttttgttgaaaatggttttctctagctttaaaatagcatctttaccattaatagtacctaaaatatcaatacttttgctaatatcatcatcttgaagaactttcttaaaaacaaaccctttcaagagctcactaacactgttctgatcaatcatttcaccaacaaccaaagaaagaaacagtgaaacaaagaaaagctataattcccattacataaccataataaaaagttgaaaaaagactgcgccctggaaattaaaaaacctatcaccactgcctcccttggtattaattaacagcatcacgtcctctaattatagttgttgtggtaaattcaacatctttgtctgcatccttttcttttagtttattattattactcaactggagtttctaaaactattgatccatatatcaaactcattattataattcattgatgcatatccctaaattaattaaccattattcagatactatctcggatgtattcacaaagaagaaagattatgaattcctggatactctaggtgcaggatctttcggaactgttagaaaagcaatccaaaaatcaactggtagagaagttgctattaaaattatattgaaatcaagattacatggtcatcttgatgtcgttgaacgtgaaattaatttattaagctccgtaaaacatccacatattgttgaattaattgattcatttcaaacaaaacataatttctatattgtcactcaattggctaccggaggtgaacttttcgatagattagtcaagaaaacttcatttactgaatctgatgcatgtgaaattgtttatcaaatgcttgatgctcttaattatttacattcaagaggtatcgcccacagagatattaaaccagaaaatgtcttatatttatccgatgatgattcttctccgattgtattggcagattttggtgtttcgaagcaagttaacgttggtgcacaagagaaattaactggtgttgctggttcattcggttatattgcaccggaaatttattcaagtgaaggttatggtgatttatatggtttaggtaaaggtggttatactttaagttgtgatatttggtcattaggagttgttgcttatactttaattggtggttattccccaattagtgctcaaaatcctcaagatttccttgatgaagttagaactaataatttcgtcgtgtttcatgaaaaatattggtctggtatctctgaaaatgcaaaagattttattattaaatctttagatattgataatagaagaagacctagtgcacaaactttaatgaatcatccatggattcttaatcatattaataaatctgacaaagttaacgatatcaatattatttcaaatatccaagaaggtttcaatgctcatgctagattacgtagagctgtaagattgattatcatgaagaataagttagaaaaattaagacaattacgtgcatcttcagctactaacactatggattccgctttagcggatgatgatccagatgagtatttattctgtggaaactcacaagattctaatatattagaatcattccataatatgaagcttcctaatgatgagccatcaactaccacactttcttccattaaatcttcagacaatgcttccatttcatctgaaaagaaagaagcagcagcaaagttaaagagtaaagaattggcgattacatttcaaaatctagtacgtattgcacaagattccaaggatcaaatccgtcaatttcaagaaaaagaggaagctaacgaactgaaaggaaaggaatcttccgattttaatgaaaatcaatgatattttttacaatattaattaaaatcatcaaattctttttaatgtatatttttttgtatatataattctataaaatagtgaaatgtttactatagtagattcatgctttattaaaatcctaatgacgcctaagaaaattctttagtttttgcttcttcttttcattttcatttctcatcctattagacacattatcaatttttagtttctcaagacctgatcctatattgatcaatggtagttcactttctttcatttctgtaacaccttcaagaatacctattcgtgataactttgaatgatctgctaattcacattttgggactgaaagaattgtttctttcccatcagaaaaaatcagaaagtttgttatagttattggaatatttccgattttaatcttaatttttgcattagatttaccataactgatatgaatttcaatttctttgagtttaccatagtctagtcttgtaaaatcgtattcatctctattaccccttatcaccaattttctaagtttatttcgattcctaatcatctcagttaatagatgaacatattgggatgtttaaatcgctaaatgatatatcaagcacctcaacagtagcaggtaaactgtttttgaaaacagaaacatcaagtttgaaatttaagtattgaacaagaggaggtaatagcttaagatcatattccattgatttacccataatttgaaaatgtgtaatacttttcagattagaaaagtccatagacaaccagtcaattaaagtatctgtcgaaataatcattatttttagtttctggggaagtttgttaaaaaaagattgaggcaatgcagatgaaatagcaagttttagttgatttaacagagccaagtcttggatattactaaaattgggaaatccactagatgattttttcatttcatatgtaaggtgtttcaaaccaggtggtaaaataaccttcatttttggttcaaagtagcagtttgacaaaatcaaagattttagagtttgaggtatagaaatcacttatattttctgatacttcacacgaagttaggttaagaccaattaaaccaggaaaaccttttatcgaataatttatgttcttgtcaaaataactcagagatagagattttaactgtttattctttactcgaaatataccgttcttattgttggaatggagtacagagatcttaagtctctccaaacagtaataattgtccagtgactgcaaatctataaaagtgtctgaatttaaactgatgtttaaatctgtgatataataacaaaaatcggatagtcgttcaaccaaccattcaaatttcatattttggtatgtcagactattatcaaggatatgaacacttatcgatgcaccattcaatgcgattttcctcaatgcttcaaataaataccccggtagttgtaaatttcgatcaattaaaactgtaacagtaaaagagttcaaacgtttcaactttataaaaaacattaaattcttcataagtattttcgtatctacaggataattccatatattaagcacaatagtcaacaaaccggataactctttcattttaaaacatgtcagatcgtcaagagaactgagtgataaaaagtcaattttgttgagcgtaataatgttaattctcctatattcttccaattgatcgtaaaatacatggcatagtttatttgctgattccaacaaagtaaaaagttgttgatttaatgcaagaacatcaccaatttctctttggaaagccaatttctgtacttttatcacaccatttttaactaaattcattaattttgaaaatttctctgaattgatcaatatacttcctctaacggtttccacggataaataggtttgtccagctaaaaatcttgaaactatgaatacttttgaacaaaaatataaatttaaaaaataatcaatctgatccgaatgaccaaataagtcaactatctttgataaatcaaaattttgaaatataacattattccatattctactttgaagttcaaagggtaaagaggggataatttttattatttgcaaatatctgggagttgtgaatctcttaccataagaagttgttcccattttttagattatatttgataataaaacatcaaagaagtagcttgataaagaagattgagttcaatatgaataaaaaacatagatcaacaaggtatacaattaacaaccaatacccagcgatgatcataaattgatgtgatctacagccgtttgtacactaaattttgttagcagcttataatatatctggtcctgccgatccgatacatgattaaagtcactggtacagtaaaacgatacatagtaacatcaattcatctataaaaaaatcatttgaaaatatttctttgaatatcctggatcagaattttctgtaattgtgaagacgtatcaatatctaaagctaaactggagtttaacagctcgacatcagaagcattatgtttatcattcatcatagactcatcagtgtttgatgcacttccagtagctgttataaccattgcatcattattgaagtttgaaaaatgaaccaaattttcatccatttgaatattttcatcaatttcttcacttgatccttgatcaaaaaactcagaagcatcagatctattaaatgatacggttcttttatttgcataatttggaaaagaactaatcttcaaacgagttaacatttaattttttcctttcattagctttgttattagctggaaatgttaaattacgaaccacttcattcattcttctaagtattttgatcgaattataggtttcattgatattttcattaatatcacctttaagatcggttctaaacatttcttccttgatttcatcaatattgggtatacttagagtagaataattagaatttgattgattcatattttgtaacattaacttatcgtatttattgacaaacattttcacatcaagaggataataatctctagcatgccatcccatagaagtatcattaattttggccgtatttttcaactgagcgttttcatagaatgttctaaatgcaccaatgtcaatagttccattttgaatactctttattggatcaatgacaattgcaacataaggatcttcaaatccttgatgtaattgttgagtttgaacatcaataccacttaaccaacacccaaatcctggatgagaatgataccagcctataatatgttcttttttaattttgctttgttgtaatttagttaaatattttaacataaattcgtatgaatcgttttgtggattgactctactttctgtaccttgaacaggtaatggataacaatcaagtacaaatagttgacttttacgataataacctactaacattcccataatttcaattgatccaccagatattgcatgcattgtcattttcatcattgctaacattgaaatattgactgtttgaaaataataggggtgtgatttccatggtttttcatcatttggtttagcttcgttcaaatatgtataaaaataatcatctgcttcatttacaagtaacttacgtgatatagttggtggtgtatctttaatggtcccactactattcttctctgcatctttctgtgatatgatgttctcagttactaattgattcagatagccaaacaaattaaatgtgctttcattgctatcatctgggccacttccgtatcgaacacattccctttctttcatatcagagtttagttgttgttaaataacttcatgaacctaccacatgatatgctggctcaatcttcgatcggctcatgggcactccttgaataaaattcatgttcccagtttattacgtaagaatatatttcaaaggtaatatatcactttatagtagattaatcctatactttgaaggcttaacatcaataaagataattaagttttatatcaattatatagaaaattatatatatcattaattagatttatagctttatgttttcagccttcatcctctcttttaattttgccattaatgaaggattacctaaaattaaatcaacttcagcatcaataaccgctgattgttcactattactactagcaccactactagcagagttaattctatgaatttttgtatggaaatttaaacttgtattagaatttggatttgaattattaccagattttatatttgaacctgaatcagatgacattgaagttacacgatttgttaatggagaatgaactgttggatgtgaagtatcatcagtttcaacattataatcaaatatatcccaatcaatacttggtttctttatatgctttaatgaatttttacgagataatgtaattgctggagttaataattccgtgttaggattgttcatttggaaatttgttaaactatgaatattaccttgaactgcctgtgcacgtaaatcagatgaactaccttttaaatttttacgaatatttggtaaattggtcatattagaattcgacaagccagctaaacttgttaaacttgcaatacttggggaactattcaaactcattatacttgctccacttaccgagtttttcaaagattgtgagtgggtatcattttccttgttgctattattactattattactgtttaaagctcttaaatcagttgaactgtttctgcaaaattcataagcttgcgattcagatctttcacataaattctttggagattgtactttatttgaatccatagaattatttctagttggttcaccgtgtgtataactatcagtttcactttctgtatcagtatcagtattatagttaaattcattatcactaacacttctaccacctatacttaaattatcattaagatcataatttaaactgtgtcttaataataatcttcttaacctttcaacatcatctaatacaacagatccacgtttacgtttccttttcataatttcagcaacatcgacctcaataaacatatcagttacttgatcataatgccaaatttttaaatctaaaccataaggttttggttcaatacaataaacataattatgttgaacatctaattctgtcaacatttctttatttaaattcatgaaataacacaataaaactctgatgataacacgatgagaaataatcaaaacatgatcctgtaatctctctaattctataataatcggtcttaatctactaataacatctaaataagattcaccacctaaacctggatatctaaatgataatttattttgtaaagattccatataatcagtaggatgtaaatatctaaaatcatcttcagacatcgaatcatatgaaccacaaccaagatcatttaagattttaaaacttttaaagtagaaatcatcacgaggaaaataatgggcagtttcaattgttctgttcaacgttgaagtccatatattaaaatttttagaatttgaagaagaggaataagcactagggggtatattgttattgttactgttattgttatttgtgctacctgtactcgttgttgtagtattactataattggatgacattgaacttcttctatctgttttaaaacttgatgtatcatttacaaaatctttactataatgttttagtttgaattcttgttgtttttttgcaataaattttggtaaagctttagcaaattgaataccatttcttgttaaatccgaatcaccacctaatttattctgtacattaaatatagattcaccattagctgttaaccaaatttgacgatctgcaagattgaaattcaataaaaagaagacacactgagaactcaaataaccacttatattgaaggatataacttttttaccagcatttataattttaacatattgaatatcatacttttcattttcaaattcttcagattcattgattgtttgataaactttttcataattgattaatctattacgaaaatcttgtaatgccttttctggatccatttttttataatcgggaccacttaattttaaacgaatgtttttttcaattaattctgtatcagtacaaattgattcaagaaataaaattttaactaaacctttagttcttttattaatagtttcaacaatccatttcctccttgcatgagttgtattagttgcatcaaatattccaacattcccatcgtcagataataggaaatctaataattgattaagagtctcctttgcccattgttcacgtaactgaaaatttttcttattattatgatcaaataaattagcatcatgaccgtgtaatgggtcattattattactgttactattattattattcttattatcattaaaatctggtattatattactagttgaagggttaggagtttgcattggagtactatgatcaattgttggaccttgaacaggatatttacttggttcataaacattaagttgacgccttgtattaccaacattaaaaatttttgtattatattgcatccaattaagatatcgttgtaattttttcgttatataagatttaccacgagctggtaaaccaacacatacaataactaattttagagcatcatcatttgaggaagcagaatttgaagattgtataacggaggcgattgattgtgaaatttccatatcagatgattgaattttggaattatcaatggaaggtttagtgatacctgaacgagaggttctccgagacatcgagagatggtgtgttgtatttatagtaatgaatcgaagttggttgattgaaagaatgaaaagaagacatattcagtgagtcaggaaagtcctataccggagaaacgggtcctttccttcccaggttgtgaaaatttcatgtactgttagcaaattgcgtttcttatataagggtgttatctttatatgactttctttatctttattggataaatggaataagtgtccattactctatattgtattctcattgagctatatgtgcatggtattagtatgctattgtaatatatgaatggtaatgtaggattgtatactatactatactatactatactatactatactatactatactatacagtacaacttagtatactgttgattacctaataaatctcacattatcaacatgaatgacatctttaactgggcctattgatatatttcagtttaaatcttgcttctatatcttattcttatttaacttttctcagtacatatactcaacaatatgcaagatgaagacaacaaaggtaatactgagaataaacctattacgagggtagtaccaccacttaacttttcagcagttgaaaatggtttatatagatcaggacaaccatcagctttaagtcattcattccttgaacaacttaatttaaaatctgttgtttggttagcaattgaagatccaaatgattcattattaagatttattgatgatcatgatatttcatttttctataatttaggttatgatgcaatgggatcaaattcttgggatggtttaagtgaatcaagtataaagcaagcacttgaaataattgctgataaacgtaatcatccattattagtttgttgtggtatgggtagacatagaacggggacagttattggatgcttaagaaaattacaaggttggaatttagcaagtataggtgaagaatataggaggtatacaggtataaaaggtggtagaattttagttgaattacttattgaagcatttgatgtttcaacgatatcaataaatcctcaagtagcacctgaatggttacttcgatagtaaatagtttgattcataatcattaaatgaagaaaaaaagtattacattaattaagattttattttattctattctttatatacatgggtaaagtaatcattatttatcattatcttgttgattctttgcttcaaaacgttgttgtgcaagtcgtacggccatttgtgattgtctacgtacattattacaatgttcccaaccaaatatactacctaacataagaccaccaaacccccaatttgctgctctacgtatatttctatgataaacatataaaactgatgaaaatacaaacatacatgtaaaaccagataatcctgcatctctaaaacatggtattgcagcaattctacttatatggaaatgttctaatgttaaatttgaaaggaatgatttaatttcattaccaacagagaatgttggtggtggtggtttattacttccattatcaaattttggtggtacatcttctagaaagataggttgactatcttgcttaacaggtgttggatctaccttgacttcttcttctgttgatttagtgaatggccacattgtccaaagaagataatcgtgattaatataatgagaagttttcacttagttaccttaatattaatattttcactatactgctcttatgatgaatctacatcatattatagtatagccttctttagtgtataacatactacaacatactacaacatactatacgcatatatatacatgtactacaatactaccatactactttcttctgcaattcaagaccacctcatacacacacaatagtaaatcggatattaatacccgtttacccataataattattaagaactgtggttctgaatcgcaactttctcttatgtaacaattaagcttttctatttatttaagatttctctccttatcttctttcactacttatttatatgaatcttattgctttatagtttatcatcacttgatagatatgtcgtctcccaatactaaaaataccacaaataataatacaaacaacacaaataatataaataatatgcctcctttacataatccaattgcaactcgaaggcaatcaactgctaaattaacatctccactgtacaacactcctggttcaatatctcaattatctgcaatttataaagatcgtcattcatcatcttcaactacaaatgaaatacctgcttttaataataatatattaacttcaaatactccaaattctcgtaaacttttcgccccacctagaatgtcatctccagctattgaatcagatgatgatttaatcttaaataattcaccaattgggtcctatggttcatatgttgatgatccaactattcttaaaaatgtttcaaaacatttacataatgatcctcaaactgctctaaaattagcctcaggtgatattacaagagatttatatcaattaaatcaaccaacaatcaaacgttcaaaatctttctctggtggtactaatgatacaattaatgaaagacgtggctcaatggcctctcaaatgcgtttacctggtggttttagaagagattttattcaaatgaagaaacaaaaatttggttataatctatcacaaccaactaattttactaaaaattttcttgaatttttaactatttatggacattttgcaggtgaagatttagaagatgaagattatttagtctgtgattatgatacttctccaaattataaaattgatgaagaatctgcactgttatctcctcaacaacaattacagcaacaattacaaaatcaaaaacatttaacctcacaacaacaattagatgattcatctaaaacttcttcattaaaggctttctttttattaattaaagcatttattggaactggtgtccttttcttaccaaaagcttttagtaatggtgggttacttttctgtattatcattttaataattttcagtgtattatcatattactgttatttagttcttgcacaatcaactgtcgctacaggaatttcatcatttgctaatctagggggtagtctttatggtagttatttgaaagttctcattcttgtttcaattattttaactcaaataggatttgttgcagcttataccattttcacagcagaaaatttaaaagcatttgttaaaaatactgttaactatgaatttccattatattattttgtcatctttgaaacaatttgctttgttccaatgtcattaattagaaatattactaaattatcagttgctgcacttttagcaaatattttcattcttacaggtatttcaacaatcatcttttacacagctaaagatttaattaaaaacggacctgccgaagttttgatgttcaataaaaatgattggtcattgtttattggtgttgcaatctttgcatttgaaggtattggattaatcataccagttcaacaatcaatgcgtcatcctgaagatttcccgaaaattttgtttgcagttatggcagtttgttgtgttttattcatatcaattggttggttatgttatattacatatggtgcagatgttcaaacaatgattatcctcaatttaccacaagattctataccagtcattttaattcaatttttctacgctttagcaattatgttaagtgtaccattacaacttttacctgcaattagattaatggaatcccgtatttttaagaagagaagtagtggtaaagttgatataatgactaaatggtacaaaaattcatttagaacattaataacattaacaacttcattaattgcatattgtggatctgcaaatcttgatcttttcgtctcatttattggaagttttgcatgtattccattagtttatatgtatccaccaatgcttcataataaggcagttgcagatactaagttacagaagtacacagatgtcgttatcgttgtcctgggtttaatagctatgctttataccacttataatctattcacttagtctcggaaaatgcgtgcgaaatttttagacaaatttgcgagaattttcccaccactccaagtaataattgttgattaattagtatcatcaacttctctactattcatttatcttcacatctttttatatcattcttttatagtttaatagttaaactttatcaggcaaatacattcattatgggaagatcattctattccgacgaggaagctacatacaatactccaggactaccaactgttcctagtcttgaacatccaacttcaactccaaatactgatgcaacatcaacaattaatcgttttggtaacattatcacaacttctccaggtttacaaaactttgtttccaaaattcgtaccactactattgaatacactgaaactttccttgaaaaatatgattatattacatcaactgcagtatcacatagtgcaatgactgctgatagaattgcaagttttaaaaatgaaaatgaagttttcttgccaaatgcatgtatcgttttaactgctgcacttacaggttcaattgctgcaagaaatcataatttcctcttacgtgcaactgtaccacttttattagctggtactgcattaaattatacaatgccaaagacttatgataatgtatctgaaggtttcggtaaagttggtgcgtcaattgaacgtcgatacttcccagatttcaagaatgttagagagtcagttgctaataatacccaacaaactactgaaaatgtaaagaaaattgaaaatgaagcttggaatggattggtaaatttagttggttcaaccagagaaagtttagttgaaacgttcaataaaaaaaactagctttgctttctattttttgaaaaaacaaacttctttatatttattttacaattatagataacgatacttatacatacatacttaataaattatttattcagttagaacggaagattttacctaagtcaatataccttctaccattgacattcaaatatttgtaaactacgttttcataatttttgaattgcttacggttttgttcagctaatgcttcgatttctccttgattatatttaataacatcacttttttcttcatcattggcatcttcagataatttctttaatgttccttcttttgctttattaacatcaaaaatgctctttaagtaaagtaactgattgtaaatcattttatcgttatactttattttcataacaccctgacaactatgtgcagtaccatcactaccaatacattttttaccatagacactcacttgtctagtttcaataccacaatcatcacatactaaccaacattcataatatcttgcgatttcctttctaataaatatttctaaacttgcagctactaataatggatgtaatatatcatcacactttttacatttgatacctttaaatgtaaccaaatatttactattactttgaataccaccaaatgaaaattcgtttgaacaatttgaacatttcagatgtaattctttcatagtctctaaatctttcactagtcaggaatggtagattctaatggttgtaattcattttgtttaacaatttctcttgccttagattcatatcttctactttctaatccctaaagagtttgctaatctaacaacatcatatccttcaactctagtcaataatctatcaattggattgaaaatttgcttctctgcataatatttaatatctggtttataattctcttcattcttaccaataacttcaatcaacgcacgggctctttcagctacagaggttgctgtttcatcggccttatctgatgatccaccatcagtaatgacaaatgtaataacactaccagctttgataaccttaccttgaccttgtaatcttaatgcaacttgaacagcaggcatacttttaccacctggatattttgttggatctttggatagtttagtattaatacgtagtttaaccattggtatttcattagattcaaattctttggtaatatcttccaatttagaataaatcttagtcaatgcttcttgtggatcagagtcattcaaaatttgatttaacacataaacagataattccttagatagtggacaatattcacgtcttttcatatctaaacctttgacttctaaagttgaaacttcttcaccttctttattaacagtaacatttagtgcagcatactttttcttagaatgtaaaagtaatcttttgaaaacattatcaatatcaatttctaataacttatatctttcattaactttttctttgaagccattcccaatcttaattgcatctttcaaattatcacaacgtgtatcaatcataacagaatcggtatcaccataaacaacagttaaacctaaactttcagccaattgtctagtatccattaaaatttctctacctttattagtaactaacattgctaaaggtttagcataaaatctagagttcacataacctaaacaaccatacatagaatttgcagtaacttttaatgccatttgcttaatatctaattgagctaattcaattggtgtcaattttggatttttcattaatgatttaacctctctacgtctagtaactaactgttgtaataattttggtaaaacaccaaactctttattattacctggaattttaggcaattcatcatctgtaagattacttctttcaactgtagtaaaacaaatattgaattcttgaataatagatggatataaagaattgaaatccataactaaaatataattcttgtgtaaacctttctcaggttcaaaaaccaaaccaccttgaaatttagcctttttattactactaactgtattactttcttccatatcatcatcatcgttattaattgtattattaccattatcaaaattaatttggttttccttacgcaatagatctttccttctttgtgcttgggtttcacgatccggaacaataaatttctctctttcaaattcatgtaataaaatatattcatttctaccagctcttgtaccacctaacgtatgtgaccatgcattacctgctaaattagttaattgttttgaaattgataatatttgcataccaaatgcagttttacctataatcaaaacactttgtaaattttcattaagaactgccaataatttatttgcatcttctgcaacaattgggtttgctaaattaacttccataggtgaatatttctcacgacaaacaacttcatacatttcacttaattcccaattctgacattttggagttaaactttgacccatatcattggaaatatcacataataatctaccagctaacatatcacgaattaagaataaattataacgaccgtttgatctactgaatttttctgggaatactttacgttgtcgacgacctaaattggaccattgactaatatttaaatctttcattctgtgtaataaaatatctaatgtaacactttctaacttatgaccgatgaaaacatcaggatcatattttttaatcatacctgttaaacaacttaataaaatcttttcatttcctaaacatcttaaattcatatttttcttatctgctaatgattgaagaccgattggaagtgttgaggtaccaccgacaggtctaactaatgtgacagtttctgttggttccaaatttgctgaaattggaacatcttgtggtaaatctttgtataaagctaatgaaactgaaccaacttcttgtctttgattcttaggatttaagtaagattgaacattgattgataatgtattcaatggtggaggtggttccttagtatataaatttggagatatatcatctggtgaagaaactgctaattcaatgttacagtgtgatacattttgtagaatgttaaaattacaacctgtaattgttaaccaacatggacccataatttgtctttgcataacaaatgattcaaatattggtgtattataaccgaaaaatgttgaaaatgtttcacctgcaagttctggtggaatcaaaacacctttactctttggtgtatcataaggtaataaaactttcaagtattctgcctcatgtggaatatcataatgctcaaaggcatatttcatagtttcaggttttgctttgattgaatctaaaccaaatttatccattaataaaggtattatctcatcataaacatccattgcagtacatggttcaccttcttctgtagttgttttttcatcattcccatcatcatcatcagttaatctttgttttcgtggtaggaagtataaagctttggaaattccattaatttgcaccataccagaaaccattcttccatcttttgatttaattttaccataaagcaaaattgagttttctaactcaacataatcaagccaaaacatttcaactgaatcatcaccatcatcatctttcattaaaacatcattaccttctaatttttcaaatgtaatgtttgaaatatttgaggtattagattgtttagaaggtgatgaattaaattccatatttttaacgtttttcaaaggtgatgaatcaactggtttctttttagttttcattgaacttaacttgaaagatctatcgatattagcaacgttatttttacgtttagttgaaacaatgatatcatcgtcctcatcatcgtcctcatcatcgtcttcatcatcatcactgttgatacttttttcagttttaatattttcattttttttaggttggttaaaatccatagaatcattagcatcaattgaattttcatttaaatcatctaagatattgaaatttttcgattcagagttcttgattggagaggaaggaggttcaaaattcatacttgtatcatcaaattgattggcagtgtaaaatacagtttcctcagaagttgtatgttcattctttggtttcttactggaaggagatgtaaaatcaaaagatttagtagtaattgaagaattcaatgatgacattggcattgaaaaagttttatttgatgctggagttgatgtattaaatttatctgattttaatgaagagaatggatttttacgtttattagaatttgaagataatgaacccaaattggatttgaatttcattgatttggttgctttagaagtaaaatctgataagatatcattaagaatatcaggaccattgtctgcttttcttttatctttatttttcaagattaatttttcatcatttgattgatttttgaaaaaagaatcaatttttgaagttgaatccttttcacttgattctttgacagttttgacctttttaattcttttgaatttatctcttggatcttcctcgaattcatcttcatcttcataatgtaattgttgttgttgttgttgttgattatcccatgcatcagctccagtttccgcataaccttcaccattatcatcaacaataaaatcatcatttaggacacgatctcttttatgttttctatattgagcttcgtcaacttcatcatagatattaacattttcatcatcatctgaatgaaagtcttcaacttttccaccctttcttgcagcacgaagtcttgcaagtttgtctgatttagccatattatcggtaaaggtgatttatgtttagcaaaggagtaattagaaaacaataaagagctagttaaagtaccaatttcaataaaaaatcaccgttttttgttaatgttcaacgcgtcaaacaaaaattgtttaaaaaatcatttctcgcgttgtggttactggttatattactgtgtgagttctttactttacagtgatgatttggtgttactgtttgaattagcatcttttcagattacttgacatgaaaaagattctaaaatttggaatatcaacaaactatttgtgtcaattgcaaaaattgaatgaatatagagtaagattccaatttgagtgtcatcttcggcaaagttttctaattgagtgtttcaaatctagctcgcaatttttacaacaaatttagcaatttgaaattttactcaattttccgagcaacatgatattttattacctagaggaggacaaggttattaacttggtactgaatggtccatatttattaaatcaagtttaatgtcgttcgccaacttcaagaaagagaaaaatttggatttagagaatggtcaaggtagtaatgaaaacaatgaaattacaactattgtaaatcaaatatcaaatagtttatcaaaatttacagttaatattggtgatattacaagagcagaggggcaattaggaacggagaatgatacatttatgtcaagaaaatccacagctcaacaaatatctttatgcaaagagatgtatatagatttacgccggagtgctaatcatttagactctttgttagatgaaaaggtaaaatctaacgataataataataatgatagtaaacgcaatacagataaaacattagttacgttgagtttatcaaatgattatcttaaagagcaaattggtcaagtttatcaaaactttattgtcattgtacgtggatatcatgagaaacttaattctgctactgtaaaacaagaatttacaaaatgggaaaaaagtaggaatcttaaaaaaaataatggtggtataagtaataatgatggtggtaataatgtagttgaaaatgatcaaacaccgctattacaatcacacgcccaacaacaaatattggaacaaaatcaagtgtctgaaaccgcattacaatatcattctgatctgatccaacaacgagataatgcaattacttcaatatcacaaggcgtacaagatatcaataaaattttcaaggatttggatgaaatggttaatcaacagggggaacaaattgattcaattgagaataatataataaatcatgcaacaaatactcaacttgcgagtcatgaacttattaaagctgataagtatcaaaaaaagaaaggtaaatggacatgtataatattagttgcattagttgtatttttgctaatattttttgctttattaagttgacaaaactttaattttaattttttaaactcttattctattatataaatgtatcataaattatcattacaattagatttaaatagtttcttcttaatgttactattatatattaaataaaatatataatataatacaaaagattttggttattaatataaactatcaggtatcaacaactaaatttaaatatatcatttatttaaccacccttctctgtactctctatcttctcccaagttttttcgataatttttttaacagttgataatttttccttttcttcatttgaaccatcaccagattcaattttagcatcatctgctttataaggcttaaaaattttaatatttgtatcttttaaaataatattttttttatcgtcataatcaatagaatcaataggataagttaaagataaatttttcaataataaagcaccatttttggagaaatgttgacttaatttacgtaacttaaattctttttcttgatcttgaataattttaccattttcacgaatagtttcagcaatacgatcattcggtatttcagatggagcattaagtgcatttgcaaaagtatcattaattgatagtttttgttgatgttttggtttggataaagtatcaattgatttaacgaaaaattcattaatagctataaagttaacatcatttgttaaatcaattttattatgaggtgactgtgatcgagaagaagatggagatgatgaagatgaattttttgaatttggtggtggagtttcaataagtgttatattcttacgtgaattatgactatgtataacaccataaattacatcatcattaacagtcgttattttgactctgtaaaaataataaaagttataaaatttcaaagttagtatttcattccaataatgataattctcttgtgcatggtagagatgaaaaaaaaaactagagtactgtattatctagtataccagtgtacatacttataacctatgagttcatgcaataaaataagcatggtttaacagacgaccacaaactcggcgagtgggggatctagataataaataagattatatagagatatcaaatataagatattatacctttaagattgagattgcatgcaaagcaaagtcttcttactcataaacgctcttagtgaaatgatttttacaagtgtggaaaagagcgagaaagttgaaattttaatttaaaattatacttaaagtgttttacgagattcgaacatatgatcttagtgtgttgagatattttgtgttttgatattcattaatattattgttaaattttctttaacggggcaattcaggttcacagtcaatctgattctgatttaagattcagttttgaaggcaaataaactaagatcttttcattgtacatggataatttgtcttcggaggaaccttttgatccgctgactcatgtggttgatgataataaaggtgagaatgatgctacagaggatgaaattagtgaaatttactcaaatttgaaaattgatgacaataaattatcagatattggaatcgataatgcattgaaagttgaactggataatgaaatagatgaatttcctggaacaatgatagatagggatgaattaatggaatcatctgaagatcaagatatattagcatcaccaaattcaagtttctcatttgatgatactttaagtgatcaagaagttgatggattaacaaattataatattatattggaatatcctcaattaacatttgaaaatattcaattattaccatttcatgatgaattaaatgattggtttacttctaaagatatttctcatttagattcagtcttaaagttgtcaaaaaatgttacaattaatgatctagataatattaaacaaaatattgaacatggaatgaaaaataatacaaatatcctagtatatgttttgaaactagcttatatctccatgggttgctttgaaaatgctaaatcagaatatgaacttaaacaaactatatttcaaaatatccttgcaataatacataatgaggatttactagattcattattcaaaattgtaatttcaaacattactaaactcacggatgtatcattattatgtaacaatatgagtgtgaaaaaacttgatgctatatcatatgaattcttttattgttcaaccatcatctatatcataattctttcattcaatacagaagaattgaatcactatgatgaaaagcaaacagtaatggattatatcaataaacataatatactgatagaaattttaaaatcaattgataaatggaaattaatatcaaatacttctgaaaaacgagatacaagcgttgttttagaatcattaacatctaaaagtactgataatgagaagtttattcttttagctgtaactcatttcagaattaaaaatgttattagtttgttgaataacctgattatatttcaatttggagatttacaacatatacgatcaacaaaagattttttaaaattcaagtttgaaacttctaattgttcaaaaattaaaatgtctaataacacaactaatgatggagaaggtgctaaacatgaatcaattgatccagaaaagtatagtatatcttcattggattatcaatattatgttaatgagttgacctctcgatatccaacttatataccccctaagtatgaagtgtcagaaatactagaaatgacagttaataataataataataattccccacctgtttcaaatctactaaatgttgaatcattattgattaaccaacatcaaaatttgaaaggaaacctatttaaacaatcaacttttaataacgaaataccagaaattcacatagcaactccaatgccatctccaacattaactccacagcataccggaaatactagaaattactccaatattactgagcttgaacatacctctaatgaaatcaagaaaaaactgtacataacacaatctaatttccctaatatatatccatcttcagaagaagtccctaaaagtattcaagatgcaacaaatatttttttccatcacatcaaagatgactataaaacaaagcaattcactaatatctttgaagagtttgttgatattgaaaatggagttaaagattctgataaaattcataaatcaaattatgtttacactgaaaatgacataaaggaaaatccgatgtttgttgatgaaattaaaagtttgcaaaatgttgagcggttttatagagaaggtattccatattttaaatcacttattgctgttattttgaaattattagtttccaatattattccaactcaaaaaagttcagaaaatggtaaaactagacaaagaacggcaaaagatacaaatgatgctgagaagaaaccttacttaagtgaaaagttgacttcgtatgaaaaacaaaaactcgaaataaagaaatctaaagagttaatgctaaaaaatggtacatccatcattttactgatacaaaaatggttgaaactatcgaatattttgaaatttgaatattttacaactttattgtttgatcaagattatcttatttatttatttagatatcttgacagtaataagattcaagcatatgcaagtaaagatgtagatttaccagaatcaaaaggacttctaaacaatcgagttgtttattgtgattataatgtcttatactacttaaaagagtataacttcttcaagaaagcaatatcattatcacaaaatgtaagcaaagttgttgatccaattgatgaaatgaaagattttgccgaaatttttgataatggtgctgaatatgatgaaagtgaagatgatagtagtagggatggcaacaaaaataaaggtgacttagtcaatccattgtcaatcattttaccatatgttcctcacaataaaattttcaaaatcaccaaacccaataccagatgttgtatattactatcaaatttattacaatccatgtactacacagtcagtcattttaaaattcaaagaatttacaagttaataggtattagaccaacggaaattttaagattttatttaacattacacaatgatctattttatataccaatattgaaaacaattaaactgatgtcaccattcattggtaagaaatggagagcaaataatatggatttaatttcatttgtttatctatttcataaggttggattgaaggatccgtggttgaacaacttttttaatgcaggaattgaagagaatgctaaaagaggttacgataatgaagtatcactgagatcattgataaaattttataattttacatattatggagatgtgttaaaagctcgtggttttgaacaggaaggtgaccagtttatggaggaagttgaaaagctgagcggtgatatattcaccaaaggatgtgttgaatctgattagagttttgtaatatactagttgtaaaaaaaagttaaaaatttagaaagatcaaaattttttatccgccgaggcagttaccgaaataggaaattgcgataaaaaatctggttatcttggctgtcaacaaaaaaagttttagattgatgtatctgaagcaccatctttattaatctcttaaacatgttttttttcgctttaatccataagagataacagacttgacactgaaaaatatgaacgataaacaggttatttcttagtccgtccaaaagcaaccaaaacctgtaaggaacagaggtggttgtttatcatgtcgtaaaaggaaagtcaaatgtgatgaaatgaaacctgaatgtaaacgatgctcaaaatccaactatgtgtgtttttggccaaaggatggtaatgaatcattatcacataggaagtaattttaaattagtgaaaaaatcgaattctgaaataaagttcatttcaatgaacaagaataccattaagaaggctagatgtgattgatgaagatgcattaataagaaggtatattcgtgagaatactttgagtgttgtcccaatctattttaaatggtatgaatcacagggagatgttctactatgatgcatttattaatggatttattgtcagtatttcaaatcaacttgcacatgaaaaattattacctggtacgattattgttccacgaggattacaggatccaataattaagaaactatgcataagttgtggggaatcatttatatttcgatgtcaagagggaaatattaggaatgatgaaattgtggtgaaggtgaggaatgaaagtttgaatattcttgactgaattaattaggagaattgataataactcaataatgcaatgtcgtgaatggatgttaatttatttcattctttggaatgcaagacaaaagtttttatatgagggaagacactgcacaaacgattaatttaatttcaggtattgaagctattaaactgtgggttgaaacacaaaaagtatacggtaatggaaaatgaaaatgtaaatgtaaatgatgatcatgatgatagtggtgactttagtgaagtttgaaaatgcagatatttacattcttggagaagagaaagcttctattgaggaagttaaatcatttatgttacttgataaattagtcaataaacgtcaaatgattgaaaatatgaaatctgacaaaatttataaagcaagtgcatttgagagaacattgttagagacatttgttttcaattattcatgtacgttattaactattgataaatcattgataaaatgtgttccgtcaccttatgaagtatttaaattaataacaccattgttggaaacacctatctttaattgtcctgttccatggatgaataatccaacaatgggagcagcattaccaattattgaatatcaagccaagattatttggttatcatttcaatacaatgatgggtatgatgatgatgtgttagatgagattcaacagtatttatacccaatgtgagaattatgaaataccaacaattcatcaatgtagattaccctgacaaaattattcataaattattagagagttgttatataagtaagattatatcaattggagtttacatttttgcaactaagattcttcaaagaaataaaagagttgaatatgatgagaagataagagtaagtattgaaaaaatgtttgaaattttaaataatattagtcaatatagtcaaactggagttattgctaaatgggcatttgtagtaactggatgtgccattattgataatgaacaaaggaggaaattacgtgaaagattattaaaatttattgatgttttgaaaactgggtcattaagaacaactgttcaatttttagataaagtttgggatgatgaaattggattagatgcattgtttatagaagattatctaaatttattagttatatagtaaagaatgatatatgatacaaatgagtgatgattaattatttattcaataattttggaaagtagttgtaaattctctacatgagaaatagataattgattaatgaaaacttgtcattattttttcgaattcaataacaatcttgttacttaatgaattatatagtgattcaaatttattaactaaatagtgaattaaattttgataaatcttgttgagtttgatttgaagcatttgaccattgaatgaaaatcaaaaatttgaagtttgaaattcattaaataaatctgtaaaattttcaataatagttaataaatgatatagtatttgatttaatggtacattaacatcatctgatgaataaaataaatctgatcttgaaattttagtgatgtaatcttcatgaattgaagttaattgttgtagattgaataaagtttcattaggtatatttaatggaagtaatttgttattatgtaatgaataaggaattgttgaagtaaatttattcattaaaggtatgtatattatttgagataatttcatttgttatgtagaataggatatgatcaataaatgaattaaattgaagatgaattaaatgaaactttctttgatatttaataattttacgtgaagttatctttttatgtattattgaagattgtttccaaattgatgataatttgtattttaaatttgatagtttaaataaaatattaaaacttcttaaatattctttataagaagaacttataattgaattaactggtgttaaaactttataatcaagtgtgaaaaaatcaattgccgatgatgattctatattgatatttaaaagtcttgcatcaagtctattgaaaacatctttaggtaaatttgttgaaattgaggaagaatctaatgatttttgtaaaatagacattaattgatttgaagataatgatgatgcattatttttcagaattgatgaaccattaaccaatattgaataagttaaatcaccattaaaagtaagtaaaaatctataaagaaagttaatttcagagagataaattggtaacagtaatgaatttagatgagaaataacaattttgtataatgattctatatctatttttaataaatcagtttgattattgtaattattttcataaaattcattacaccactgagaatcatttaaaaatgattttaaaaaattaattgctgaacctatatgaaatattttttctgcagttgaaatagatataaaacgaggtgtattttccttaataaatttattagatgagaagaaataaggagttttatcattttcatctaatataccagcaaataaccaatttgatattgatgaaaagtaaggttttgaaataattttaaaataatttaaagataatgatgagattacgtcatcgcctaattttgagaatgagtataattcagataagaaaataggtaatgaatttgatcttgataatataataaggtaataaatatgtggtattaaagtgaaccagtcatctaatttgtgtcttaatagagataatgaagttgtatcagttataacattattaatagtattttgcaattccttgagagacgcgtcgaccgtagcattaagagcaattattataggtgaaaacgcgtaaatatcatcattatctttaatatctttattattattattattattattattatcattattatcattgttgttttcaatttgagaatttagatttttcaatagtagggcaagttgaacgaaatcatcaatgtaaggatcctctatctgtgaggagacagttactgaattatgattgaattgaaatgactgtgaattgtatcccaataagagtacatgcacgtcacgcagtaacatagtagtgtgtatagtctgtgtatataccttgaacactctacaaagaaaaagggcggagtgcacagtaagtaattacaatttaaagaggaaaagctgggacgtagagaaaattcgagaaaatgaaaaatgaaaaaatgaaaaaaaaattttgaagaagcggcggctcatcgggataattaatcactgaaaattaaattaaatagtcaacgagccccctccttttcagctttttagtggggtaaagtatttactgtcttatcttctttaaatagagtgctttatctggtatttctgtagttatttgaatgatatctcgagattaataatactcttaagacaataaacaatacaatggatgaaattgattcaatagacgcaacaactaaaacaaataatatattattagaaaatgcaaaatcttttgctgctggtggatttggtggtgtttgtgcagttatgactggacatccatttgatcttataaaagttttattacaaactaatcaacataaatctgcaatttcagctgtaaaatcaacaatttcaacaaatggtttattaggtttatataaaggtgtttcatctcctcttttaggtgttactccaatgtttgcagtttcattttggggttatgatgttggtaaaaaattagttttatcatttagatcaaatgaagatttaacaactccaatgtacaattacagaaatttcaactgctggatttttctctgcaatcccaacaactttaattgctgctccatttgaaagagttaaagttgttatgcaaactcaaactacaaaatcttcatttggtgcaactgttgcttcattatataaaactggtggtatttcttcaatttttaaaggttcagctgcaactttagctagagatggaccaggttctgctgtttattttgcaacttatgaaattttaaagaaaaaattatcaaaagatgatgattcattatcccttttagcaatttcaattgcaggtggttttgcaggtgttgcaatgtggacaacaatttttccaattgatacaattaaaagtattcaacaatcttcagctgaaaaaatttcaatgtctcaagttttacgtaaaatttattctactagaggtattggtggtttcttccctggtataggacctgctcttgctcgttcattccctgctaatgctgctacttttgcaggtgttgaattagcaaagaagttcttgaactaataatatcattttagctagcctttatgatgtataatatgatatgatatgatatgataattgtgtatattcctctaattaagtaatgattctttgatttaatgatttaaaaaaattaaaaattaaaaatatttttcacatggccctctctctaaggaccccgttgaattccttcccacccgaaacttcaacaactaatctcaatcagtgtattccattactttatttttttcttttcttttctccttttaatcaaacaactatgggtatattcattccacaaacatcaattgcacatttaaatgaatacaaatatcaaagtgaagatagatcactcacaactaaatacattttaaaacctttttggcttaaatttgtaaatatttttccactttcaatggccccaaatatggttacacttttaggattaatgtttatagttatatctgatattttagtattttattttgatccttattatgatacaatttcacctcaatgggtttatttttatcatgcatttgcagttttcatgtatcaaacttttgatgcttgtgatggtattcatgctcgtagaactggtcaatcatctccactgggtgaattatttgatcattgttgtgattcaatgaatactactttaatggtgattcaatttgcttcagtttctaatttaactaccaaaacaccaattattttcattgttcaattttctgctttagctaatttctatctttcaacttgggaagaatattatactcataaattattccttagtgaattatctggtcctgttgaaggtttattaatgattactggtgttttcattttaactggtatattaggtgttgatgaaatgtggcataaagttttatttactgttaatatttcagattcattacctccattagaaattacatcaacttatctttctgcaattgctggtgctttcgttatgagttttaatatttattcagctagacgtaatgttattgatgctttgaaaactgaaaagagaacaaatgaaattaaatctgcaatggatggattaaaaccatttataatttattattcaaatatatttttccttttcttacttcatcctgaaatcattacaaattatacaacaactatgattattactataggttcatgtatgtcatttactgttggtagaattattcttgcacatttaaccaaacaatcatttccatatgttaatttcccaatgtttgtacctataatccaagcattattattagaaattttaactaaatttttcaaatggaattattatgaagcattatcattaacaatttatggtggtttaggtttaagtattgcaatttattcagttttcattattgaaataatttatgaaattacaacatttttagatatttacgcattatcaattaaacatccaaagaaagatttaaaaaataattaatttattcattcataatattagatttagattaattagatttatttatatttcaaaatatatacagtaatagtaaaaagaattttaaactcaaattgattttagctagttttagcatgactttagcataattttttaatttaattatttaggcttcttcagtagctggagctggagaaggtgctgctgcacccggtcctaaacctgcaccagttaattctttttctaattcagttaattgagtttcatttaaaattgcaattgctaatggaacaccaattaacatacttgtagttgcaacataccataaacttgaacctaattttaatgttaaagatttacttgcagatttaatattacttgataaattagtgaagatttctctttgctttggagagaagatatcctttaatgcttcaaaacgttcatataaagtttcatcagctggatcaaaatcatcatcatcataatcactttcttcttcactttcttcttcagcaaattcttgttctaagtttttgaactgctgcttcaacttctgcatcttcttcttgttctaattcttccttttcttcttcttcttgaagaatttcttcaatttcttctgcaacttcctctgagacagcttcattaatttcttcttctgctgctgcaacagctgcttctaaagtagcaacaacttcttctgggttaaattcaacggcttcagacatgttcttagttatatttataagatactatataatataaaattacccactattacaaccctctattttataatcattaacgtccaggaaggggattcatggaaaataatttagtattggaaagagtgagtatgaaaattaatgtgggtgtacaggtttatgactcggtcgacgcgacgggtatcttcttttagtagtaatacatgcatttacacagttatatacctaataatagcatcaaatggtacaggtatcaagcattctaccaacaactttaactaattgagggttctcacatgcggcacatactctctctttatcatttaattgtttattaacttgattttcactttgatgggttccttctttaacataaattccaattctataagatttattaacactacgatcaagtctaactcttatacctaatccaattaatgtagctaatgaacaatgtgtaatagttggcgttattttaacattaactgatccaacatatcctttatctaaatcaggatgtttaacatgtatatcacttaaattgacaactgataattgacctaatgtaagtggatgttcaggatctgatattgatgatataagatcatatatttcttgtgcatcaattggttcatcatattcatctattttttgttctatatctatggtatttttctatcttcttcttcttcttcttcttcaaacagataattccttatagtgttgtttaatttattattatatgaaatgtgaggaaatgcattatcttcattacttgatccaccctaatcttgttggaagttgtgatacatctttcacttgtgggttagcattgataggttcgtcagacatttgtttatgttagtgtggttggtttgaatatttattaaaaatcaatcaataaaaacaaagctattattaataatgttaaaaatcaaaaagttgaaatttataaaatggctggctttgcgtgtttcccaaaagggaagtctaatgcattaatactttgattcttattatcgataagtatataggaggttatactattgtataataacagtagagtgtgtgaagtttagtacttatattgatctagtattgatctgacttaaaggtttctttctttttctttacctctttaaagcaaataatgtcaaatctattcataacagccgctattagagatataattccaatgcaacaggaaccttatccgcatgaaattataagttatgcaaattcattatatacaacttcaaagataacattaccattatctgcagatgaggaaacaagtaggtatcatttatcatgttttgtcgttatagaaagttttaaatctgaatataatttacctgatccatataggaataaaattccaattaatactaataaaaaattaaatttgttattaaattcatttagaaatacatttaacagtatgattgaatcaactccgagatctaatcgtactgttgatattcaaatgaatacaccaccatcaagtggtaaatatttaaaatcaactccttcacatattgattcaattagagcattaaagtataataaaattgatcaagttaaaaaatctctatttaaagatttaaaaaattctataaatgatggaataacaatgtcaccacctcgaacacctaaaaataagaatagaataagtaaagatactaaattatcgccatataaatcaagaactaaaattgttataacgacgccaatattagttacattttgtaataaattttacatacctgaacatttaacaagtaatattttgagaacatttaaactttatcaacatgttgttatgaattcatgggggttattagttggattagttggtataacatatttacaacttaatagacaagaattatcaaaacatttaggtggtaaaagtagattgattaatttattacatatttcacaacagggtggattatctaattttgaagttaaagaatatatacgagaagttgcaagattgaatatctacacaaagttggattaagaatgccaaatacgaagatcatgatgatgataatgatgataatgatgctgtcaatgaaaataatactaatgaaaaaaacaccaatgataataacgaagaattgtataataagatatacccttcacttacatgtttcatcactccatcagtgcagtactattccatgagaaagtcgccacagatagagcaatggatgaaacacctacgtgaagtgtacaaagacagagacttatagaatagaatatcgattagataacaagttaaaacattacgtaactctctctataaaaattttttttttcgtgaaacttcttctctgtcataacccttgggtacattacgttatttttttcactttgtatataaccgttatagttatttgtttctagaaggaagtgaaagtagaggtttctctttcatatattagttattattcctacttatttttatcctcttttaagtaattttattgatgactattgggaacggtaaaagatcaatttctgagtccgaaaattcaggacataaattcagatatcactaaaaaacaatgtattgaatctgatgaaacttcaattactataaatggtgataataactcaaagtataatgataatgatgaaattatagaatgtgttaccttagatgatgataatgatatggatcttgataacgatatcaataatgataatgataatggatttgcatatattccacaatcggaaactcaagtggcagaaaactgtggaaaaagttgttaaatcagttgtttcaattcattttatgcaaccagttaattttgatactgaaacttcagttatgttccgaaggcaacaggttttgttgttgattgtaatcaaggtattattttaacaaatagacatgttgttggacctggtccatttgttggttatgcagttttcgataatcatgaagaagttgaagttacaccaatttatcgtgatccagttcatgattttggtttccttaaatttgatgttaaaaaagttaaatatatgaatattcaacaattagaattgcatcctgaattagctcgtgttggtgaagaaattagagttattggtaatgattctggtgaaaaattaagtattttatcaggttttatatcaagattagatagaaatactccagattatggtgcaaatacttataatgattttaatactgaatatattcaagctgctgcaagtgcaagtggtggttcaagtggttctccagttgttaatattgatggtacatgcagttgctttacaagctggtggtaattctgaaacttcaactgatttctttttacctgtttggagagttaaaagagctttagaacaaattcaatcaaataaagaagttacaagaggtacaattcaaactcaatggactttggaaccttttgataaatgtagaagattaggtttaacttctgatattgaagaacaagttagaaaattaggttctgataaaaatggtatgttaattgcaactattacattacctgaaggtccagctgataatttaattaaagaaggtgattgtcttatttcaataaatgataaattgattacaagttttgttcaagttgatgaaattttagatgataatgttggtaatgatgttgaatttttaattcaaagaaatggtgttaatattaaacatactattaaagttggtaatttacatgatattacaccaagtgaatatatttatgtatgtggtgcaactttcaatgaattaagttatcaattagctagaatttatggtatacctgtcaaaggttgttatgttagtgatgcatcaggttctttccaacttggtggccctgatataaataattgttggattattgattcaattgatgataagccaactccaactttaaatgcatttattgaagttatgaaaacaatacctgataaatctttcatacctgttaaatatcatcatttaactgatatacatgtcccattatttaagaacatttatattgatagacattggttatcatcattcaaaaaatcaattagaaatgataaaacaggtttatgggattatgaaactattcaaaaagaaccaatcaaatctaaggaaattgaaattaagaaagctaaatttttagatttaccaactgagtttgaatcatgtaaaagattgaatagatcatttgttcaagtagatgcaatctatcaattaccattagattcttttggtggtcatgttagaagagttcatggtgttgttttcaatgctgaaaaaggttatgttattgtttcaagacatgctgtttgtcatgatttatgtgatattaatgttacaattggtgaatcaattattgtacctgccaaagtgatatttttacatccaacaaagggttatgcaattattaaatatgatccaaaattagttgatgcaccagttgaaactcctaaatttagtgatgaaccactgaaaagaggtgatagaattgtttttattggttataataaatcattaagaccggttgttgatggaactaaggttagcgatattggagttatgaatattccaactaattctaattctccaagatataaagcaactaatgttgaagctgttttaattgattcaacaagtggacaaaaatgtcattctggtattctatgtaataaagaggatggtgttattagaggtttatggttatcatgtgacggagaggatgaaaaattatatacaactggtttaaatattactgatattatgtgggaattagaattcttaaataaagatgaagaatctgaacctgatttaaaaattattgatgcagaatttagctcagtttcattatcaagtgctagaattagtggagtttcagatgaatggatttctaaaattgaaaataaagaaaatattgataaatttcaatttttatatgttccaactatttcaattggacttgataataaaccttcatgtgatttaagacctggtgatgttttattaacagcaaatggtaatttaatttcatctattaaagatattgatgatgttgttaaagtattaggtaaagatgaagatattattaaatttagagttgtaagagaaaaggaagaaattgaattagatgttaaattaactagaactaaatcatttataactgatagagttgtattttggtcaggttgtgcattacaaagtgcacatcatggtgttagacaaactattaataaattaccaagtgaagtttattgtactactatatcaaatggttcaccgggtagattttatgcagttggtattactaattttattacacatgttaatgaaattccaactagaactcttgaagaatttttacaagttgttaaaaaggttgaagataatacttatgttaaattgcgtattgtcacatttgataatatacctatggcacaaacattaaaggtgaattatcactattttccaacagctgaatttagaaaagttgatggtgaatggaaagcctttgtagatagaaaggaaactaaaactattgaagaagtgaaataagtaaggactctcaacactcttcgtaactctatatagtaataaatttaataaaataaaagttacattaattagctcttgctctacatgggactaagctcctaattactcctaacgtaagttggtttcgctaaaccttcctaattaggttaatgaattagttaccttgtatacctggtggataaaaactaaattctaccacaggtgcataccggcaccagtgtatatccaaatagattgtagaaaattgtcttctattttgagtttataaactataaagtattatttatatatatacacggggatattatagtaatgaagctaaggagtatactctgtacttacatgtttggtaataatctttccaatattttggattgagtatgagtagaatatgcagtacctgttctcttctttaaatctctacttgaaaaaccagcattaccatgttttctaccttgaatacctcttttatatccacctgcagtctttctccatcttttgtaagtagctctgtgtgtcttggatgcaaatctgagtgcagaaagttgattaacagcttttaaagccgatacaattgttggggttggtctgaaaagaccgcttatagcagagagagcaaacatttgttggttacaataggaaagcaagtcaggtgaaatgaatgtaatgatgctaataagttggaaaattcatgttaattcgacaactcgaaaatttcaatgcgtcgcataaataaaaattattattcaattggaacatctggatcttctttctgactagtgaagctttggatgtactaagaatatatcacttggttgtatctacactgtgctttgaagtaagttaaatgaactttagtctgattcagactcggattctgagtattgcactagtttcacagattttggcttcgattcctctttcttaagattacagtctttggcttctgtggacagtgtctgtatgtgttctaattcatcttcttctatatcatcgtcatcttcgtcttcatcggttgtattttctaactcttcttttctttcccggaacaattctaattctcgtttgaaagtctctttggcggctttattactagcttcctttttactagctaattttccataaaactctctagtgtctttacgaatacgatatgaagaattctgcttctccattttctttcgcctttctctgtataaatattgacgatggttcaacaattgctcctgaagaccttttcttctacgatggttctctgactgtgtttctgaagattctttatcatttgtcttttcatctccatctgatagtttatctactacagattttacatgtgaaacatttcctttctctgtatggttctcttcaacaaacctactcattactaagataagtgtttaataacgtcttaattagagaacactaccaaaagcgtgttgtagtgaaccgcgatctcctatcaacacttttttcactaaatttcaaacttcactccatgctaaatgtgaacttttttgtcttttgactgttggtatctttgattatatacttaggtgtaatgcagtatcgtggaaacggatacgggcaacagggagagggttatcaaaaacaaggatatcctccttatgataaaaaaagacacttttcttccgataatagaactgtatataatcaaccgtacgatcaacaatataatcaacaacaatataaccaaacttataatcaaagttataatcaaagctataatcaagggtatagtcaatcgtatagatatgaaaaacgttatgataaatattacgaaagtacagctaacgaatatccacgttcaaacagtcattatgatcagtacggtcaaagctaccaagaacgatatgaaaagtcctcatctaatcatactccatcttccgggcatacaccttcctcatcgtttactcatccaatacagtcacaatcaaacaaaatctcccctatgaataataaaacgccaaataacagtaatgaatctacaaataaggggaaagttccatcagtaactaaatcctactcattcgataatataccatactcaaatcttatctcttcaataaccacttcaaatcatgttgatagttctgtgaaatcttttaaaactgtacatattaaggattctgacggtaaaaagaaatccaaaattgagtattatgatggtgtattacaaaaagttgcagatcccagattatcaaatcctgctttgtatgagaagatgatatcaaaaaacgtattgctgaaatgtattaaaaatccacaatcagaaatgatgaaaccctcatttaaatatgataaatattcattaggagataaaccatctaatgaaattcttatatggaatttacattcatctacaactgcactaatcattaaaaataatttttcagtttatggagcaataagtgatgttaaaattattgatgatccattaactggtgttcctatgggaatgtgtttgttaagttttgatggcaaagttgaacaagcacatcaaacagctttaaatgctgttaataagtctaataaagttttacaaattgaaggaagatatatcagatgtggattgaatgttaacaatgagttatacgatcaaatttacaaaaaaactgtacaggtacgtgatgaaaaactaagaaaaagtaagattgaggatattaaaaaggaagagaagttgaagttagagaaaatacgtttagaaaagcttcaaagagaagaaagagaacgaataaaaagagaagctatcaataagagtatgagtgagaaggccattaagaacaattctgttacaaataagttgaataaaggctcaactgttctgtcttctcatgataggcatattttaccatcatcatcatgttcattaagttttaaatttcagaaccttattgcaaatcgtcctttcatttttatttctgataaatatgtctcttcaatgtatgtcagttctgatcaattgaaaagatttttattcaagtataatattaatagaatattacaacaacgtattgggttttatctaatattcaacaaagttccagacgctttcacttgttttgacaatgaagatggtagaagatttcttacttatactatgtatatgacattatacattcctgataaccaaattgatgatactagggtcggaaaattaggtaatatcaagtctgcacagaatcaattaaataaggaattaactgcttatttatttaaagatatacgtgaaaaattcattgggaatcttattattgatgttatgcaaaaggacgaaatgaaggaacttgcgcaagtatcacgtaaaaagagggaagaggaacttcaaattttaaagaagcaagaagttgaaaaccaaggaaagttgaaattaaacaatgatgatgtaactattgttaagagactagatttgaatatattcaaaaagaagaacattaaaaaacattttatacctgtctctcactcactgaataaaatcagagctaatagaaatagaactaaaaataaagctagtcaagagacgacaagtactgaaactgagaatggtagtgaacaagtatctgaatctgagtctgagtccgagtctgagtttgaatctgaatctgaagatgaagaaattatagaaactgaaaaagaaaacgaagaaggattgacagatgataagcgtaaacatacgctagaacctaccctcaaatcagcaaagaaacaaaaaattgacgaaggaagtactagtccaactattgatgatacactaaaattagcaccacaagttgctgctcctgttattgataatgaatttcaaccttcgaataagccacctggtcctgtttatgatgatgattttgcaattccattccaaccaactttagaaaatctcaaagaacatgttaaaactaaggaagattttcaaatattattaggaactatctaaggatattaatatttctaaacctataaaagatatcaatttctggacttgggaacgtaatgaatctatgaaagagtataaacaattaatggaatccaaggatgaagaaggtgaagatggtgaagattttgattttgcagaagaagttttaaccaataaagaattacaaaacacaactggaagttttagaactgaaggatatcgtaaaatatctgataaagataagagaatatatttattgcatagacgtaaacaaactaatttgaatccagtgaaacataatgaagatgaagaatccaatattacaacacataacaaagttcaaagttctagagttaatcgtgcaaatactagaagattcgttgctgatgtatctgcacaaaaacatataattggtgaaactgatcttttagatttgaatcaattaaacaaacgtaaaaagcctgttcaatttgcacgaagtgctattcataattggggtttatatgcattagaacctattgcagctggtgaaatgattattgaatatgttggtgatagaattagacaacaaattgcagaattacgtgaaaaaaaatatttaagatctggtattggttcatcatatttgtttagagttgatgaaaatactgttattgatgcctctaaaagagggggtattgctagatttatcaatcattgttgtgaaccatcatgtacagctaaaattatcaaagttgatggtaagaaacgtattgttatttacgctttaagagacatcaaaaaaaacgaagaacttacttacgattacaaattcgaaagagaaaccaatgatgaagaacgtattgtctgtctatgtggtgccccaggttgtaagggatatcttaactaattgtataatagatgtaacagattgtatagagataaccatatcatatcgtatttcgtatcgtataaaaagacgcgtccattgatattttaacatttgaaaaattttgaaatttcttcaatttccattttcgccacccatgcgaagataagtgacactttcatgcaaatattccaatttctgaaattaacatgtttatcttcgatttatttaactttagatttattcttctttctattcagtaaagaaaacatgtccgaaatgatggaagtagaggactattcaagggtaagtgattgcaatatgatttgggttaagggttgttatataagaacttgagtatatttagttttgaataatactagcttgaatgtgatgagaactatttgcattagtgcttcattgtatcattgcatttactctttttttttcttggagggccttttaggaagatacttttaagggggttgtatttataggtttcggtaatcactgtcgctaggtgcatgatatagtatttgttgaagaattatcagtatatgttggtatactgattattcatgatgccgctatttgtgttgcttcgaattaatgttgccgtgcttttagatcacactctatagttttatttctaagggtttgaaggattgaagggttttttttgcatcaatcaatgtataagtgatctatggcacattattgaatcaatcacgattctgacaatatctaatatatttgatagtcttataataacaacttttttctctgtttatttattatttctgaataaccaactaacattaatatctttttttaattatttaaggatcgttcaagatccccagctagagaacaagaacgtgaaagatcacgttctccacgtcgtgaatacgacaatagaagagaaagaggtggttttagacaaagaggtccaccaagagaatatggtggtagaccaccatatgaaagaagagcatttgatagagcaaatgaatatatacaaaaagctaatagaaaatatgaaaattcagttttcattggtaacttaccttataacatccaatggtatgagataaaggatcattttgcagctgcaggtccaattgttagagctgatgttgttacaagtcatggtaaatccagaggtatgggtactgttgaatttgaagatagagaaattgcacaaaatgcaattaatatgtttgatagaactgaatttaaaggtagagaaatctttgttagagaagatttacctccacctgaaaagaaagcaccagaatacagacaaccacctccacaacaatatgaaagatatgatagatatggtggttatgatgatagatatggtcctccaagaggtggttatgatagatacggtccttcaagaggtggttacgatgatagatatggtcctccaagaggttacgatagatatgatagatatggtcctccaagaggttatgatagatatgaaagatatccaccaagagaatcatattctgctagaccagcatatactgcaagacaacaaacaaaaggttatgaagttttcattggtaatttaccattctctgcaacttggcaacaattaaaagatttatttagagaatttggacaaatagaaagagctgatattattgaaaattcttatggtagatctaaaggtatgggtactgtttatttcaccaatttagaagatgcagaaaatgcaattgctaagttaaatggttatgattgggatggtagaattattgatgttagaaaaagtaaatttccaagagatgaagatgcagttgttggtggtgaaaaaattattaaagcttctggtttatccaaaaatactgattttacattaggtgtcacaggtgaaggtaacgaatcaaatattctttatgttggtaatttaccatgggaaactgcagaatctgatttatttgaattatttggatcagtttcaactgttgaaaaggcagagttacaattcggtcgtggtggtaatgcttctggtaatgctgttgttcaattccctgatgttgaaagtgctacaaaatgttattaaacaattagatggttatgaatatggtaacagaagattaaagattagctttgcaaattatccaactccagaaaaattagctgaattacatgaagaaattcaaaaaagtttaaatgaagaaaatgctgttggtcaagttaatgttgcatctgaaccaattcgaaatgatgaacaacaacctgctgctgaatttcaacaacctcaagaaaatcatgttgaagttgtagatgataatgaagatatgattgaggaataaacttttgttaaatcttaatatcctaatatcttatcttaaaaagccgtttatattgtttttcattactgttcttcttcctttataacttaagtgaaaccgaattttatgtatatttaccaaaattagaaaaaaaaatagtatcatctaaatttactggttatttactagtattttttaacatagttttaaactaaatctttttgactagtatataatatacaaaattatacagattaaaactttctaaaataaagcagtttaggtacgagagaataatattaatctttgaatttttatgaagggaattattgaaacatctccatattcatttgaaactaacgagttgaaagatggaacaatcttcacaacataatctatttttttgtttttttatttctttcaaatatgaagagttttgtaaaatcaccttatactaatatgaatatctatagttttctaagcagttgacgaaacgccgacaaattttttgaatgctttaaatcttgaatttttcattactgaaaacttccacctcaccaggtgtttcaatactctccttaataaatttcaaaaatctattaccatattcataaggaggtacagcactaattgtttcccttttatgttttaaacttctgaaaaatgtttcaagttttttcaatgtactataatttgtcagacaatcaataattccaatataatatacaatatccatttcttccccattagaatcaattgcacgaatgccaccatccgtatcaaatatagtatttttatgagcaccaggaacattttgatgagttatcattgataatcttttaatattttcatctaaaatgtcatcagttttacttagataacgtaaacctaataataatgaataatccataatattcaatctttgtaataattttacatcactttgtaattgattctctaattgatcctttttcatttttgataaatgaattttacaattactttcaatgaaattcaaatcttttaaacatgaaccttttgatgttttcgtttctgatgtttttcttccaaatgttgaacctttcaaatcataacaatctgaaatattcacgctattgggtaaaagattgttcataactaaaacatgaactttaacatgtacctgttttagttgtcatttttaatctatgtaaaccataaaattgacaaagaagagtatttggatttttcttaacataataataataatctttcaaaattcttcttaaatgtttatgctctgaacgatgaattgttttaataataaattttctatcatttgaataataaaatgaagatccacttttacctgatgagcctacagcttttacaccaatttcatcatttaatgacattaaatagtcagcttggttaacattgaacatacttctcaaatctctgaaaacttctggtgcataatctttaaatttaaattcatacttggttggtggggcttcattattaccttgtctattaaaaattaatttagtttcttgagtaaattgatcatctgttattttactgggtattttagaacatcttgaaactgaaaatcttatacctgtaactaaatcataaactattgcataattttcatgtgactctgaaatattttcaccggggatattatataattcatcggctttcatcctactttttattcttgaactatttaggaatgatgaagttttagagactctcatccttttcggatgctccaaatcatttataagattatgaccaacttcaacagcattctcaatatcatgtctatgccttattagtgaaaggctactacggtgattatgatggtgatcatgacctgaggttgcagcaagttctgtcctctgataattatctggaattttaattgtatttatactttgaaatgtacgtctatttatatttttttccttatttgctggagttatggtatttgaatctgataatttatttggcaacgaagaagttttatgttgtcttttgaattctgaaagttcttcttcttcttccttggacattcttggaaatgtattatttttgataggtacatcatttttttcattgggaacatgttgaagagtttttgaattagctattggaactattgattcgacttcacttttcgtctttactacagttaatggatcaatatcagagatagcatcttgagtgttaacagtatgatttttcattggttcagcaagttgtctatatgaatgagttaaattattacctgtttgagtattttctccatctaattgatatatacttgtgttttccgatgtagtatttgataaatcttcagttataagaaccaaagaatcattatttggtaagacactaactttaaaattttgttcatcttcaggtattttttgaactagaatattttgattattgttactattatcttcgatgcttgtcattacagaatcttcacaatctaatgatgaaatgccttctgaagatgattttgatacagttgttggagatttttgagatatactttgatttatagtatttatgttatttatgttattattacttaaatctgattttgcttgaaaatgaagattttttattgattttgttgacttaagcatactgaaataagtgtatgttctattaacccgattgactgtataattctacctttttttcctcctttgaaatattctattcttttaggacactataagtgattaaattgtataagatctcttctatttgaatgtaagatagatctcagaaagaactgaatttgaaagttaaataaatggtaaaaaaatatttgtgaaaaaagttccgacagaaaaacgacggtataacgggatgaaataaaagggaatttaaaattttgaattttacctttgatataaaactatgaaagagaatgaatcaactgtcaaaagtgatatgaatataggtgataaagaacaataacagacttatctaaaagagataacaatgaatgaagttatgaacccttaaaaaggaaaggcaaaagagaaagaaagaaagaaagaaacaaacaatatattaattaataataataataatagaagtatctaataggaatctgctagaaaattgtcatcctcactggcccgctgtgggcaacttaaacgggaatgatggggcacttcaaatttcaaatttcaaatttcaaatttcaaatgtaaataaaatattggtggagtcgcgtcttataattggagctacatgtctctttctctgaatcttgattttgatcttgatcttttataaaatcacttcttcttctggaaaagagtctctgttgggggttatgagtggtgttcagtgttctggtttgaagtatttgcttttgaaaacatcaccccttcaaaaatgtatgtttcatactcttagaaggacagtgtaaagtcacagatcaggtcttgcgacacgtcagaaatcatcagttcaaataccaaattgatagatcacactccacagttcacggcaataccgatatgaaggatgaatttattatatcatcggatgaatttgataccataaaagtagttatgcccacggaaaaataacgaagaaatgaagaaaacggttgaatcatcagatatggtggaagatattttaatagaagatagaggttcaatcacctctgataactcattcacagatttttatcaatacataatagatacttacaaaacatatgcaaatacaaatgatgggaaatatatagttttgattcatgttggttcattctatgaattgtattttgaacaagctgataaattctccaatatgttaggtataacattaaccaaaaagaatctgaaaagtggtccaatatctttctctgggttccccgataaaatgttagataaatatatggatataatatataaggctggttataaagcagtgatatgtgatcaagttttagatacctgatacaaataccattagcagacctgttgatcgaataatgacaccaggtattgtcgttgaagaatcattgtcgtgatttccatagaaataattatttaatggcaatatcactacctgaaactttaacaaatgatgtggaatcaaagaaagtaggtatatcatggtgtgatgttaacttgggtttattttactgtccttgaaactgaaatcacgcaactactctctacaattactagaataaatccttcagaaattcttatatccgatcctactaaaattgatcaattattgtcaggatcaatcttgccagaattggtagatttgaaatcttattacataacaaattttcaagttaggtaccaaaagaaaaggaattaaatgaatttctttggagatttgcagataatgataaattagtgggaacaacattagattcattaaagcaaaaggagaaaagctcaacatctttattacttcattaccttgaaacatgccttcctaatttcaaaacaagtttccaattaccttcctagatcagttacctaagactttaatgcaaatagactctagagctgctcaagatttagaacttttagaaactttacaatctcgtaaacgtgttggtgctttatcacatttaatagataaaacattaacaagtccaggtgcaagacttttaaatacgtggttacttgcaccatcaactgatatcaaagaaattaataaaaggcatgatatacttgaacttttcttaaaggatttttatttcattgaaaaattgaaacaattactcaagaaaacagctgatgttaataggattattagaagaatagaaaataatagagctgaaagatttgaatatcttgaattggctacaactataaacatcattgatgaaatttatcaattattgaaagattcttaccctaaaaaatcattaaaaataattgaccatgtttttcaagaatttaattcctccactagaattcataaattgggtgaacagatattaaagacaatcgatgacaaagtgtcgtatttaaaagcctaactcgaatagattggacggagaagttgttagagagttttgggaaattaaagagactgcttcaactccattgaaaaggctaagaaaacaatatgatgaacttttgatcaaatcaaaagcgttgaaagtaagtttgcaaaatcaatttttggaaggaaggctattcaggctctttgagattaataaaagatatgaaaagtttccaatatgttatagaattaagatcaactagcaaaatcattcctcaaataataaaaactttggatcttcaagttaaagaaagaacaaaatcagtaacaaaattacataactcagagtggtctgaaattggtgataatttaataagattagaatatgacataacacttgaagagaaaaaaataatggatttattgaatacaaaaatatcgaaactttataaagaactgaaaaaaatatcaccaattgttgaaattttagatgtaatgcaatcttttgcaatgctagcatcacaatataatctttcaaaacctgttatggatgaatcaactatgtttgatgttagtaatggtagacacatagttgtagaggaaggtttaaagaacagaattgatatgtgtaacttcactgtcaatgattgtaatattaaatcgtctgaagcttgggttataactggacctaatatgggtggtaaatctacatttttgagacaaaatgcattaattgctattttagctcaaattggttcttatgttcctgcagattatgcccgtattggaattattgataagatatttactagagttggatcatctgataatattttcaaacatcaatcaacattcatggttgaaatgaatgaaactgcaatcatcctaagagaagctacagagagatcattggttattgttgatgaattaggtagagggacttcaactaatgaaggtgtttccattgcttatgcatcattgttcagactactcactgttaacaaatcaaaggtattgtttgcaacacattttggtccagaattgatgcaattaattgaatcagataaaactgtatcagacacaatttcgttttacaggactagtttggtagatatcagtgatttggataaaaggtcaataaaaccaattgatcaaaagttaatctttgatcataaattaaaaagaggaataagttatcattcacatgctttagaaattgcagaattagcaggatttccaaatgatgttttgaagctggccgaaaataatttcaaaaattgactagcacagtctaataactttatagaaaaaaagtataattatagataatgaaaatttaatgacttattaatgataattagagaataaacattttaacaactcttatttaaaaaaaataagtaaaaaagtaatggacgagaccggagtcgaaccgatgacctttcgcttgcaaggcgaacgcgctaccaactacgccacacgcccaattgttgtaatttttaagctaaagtaatatagacaggtagcattatttagtcacgtgatttcaaatttttaaaaaattatgtgtttttaacaaaaaaatagaaaagtaccaaaaataattaatttttttagtaaaaaaatataaaaattacaagtgttttttagaagtattctcaatagagaattaaaaatctaactatatgagttaaaagtgtaaaatttagtttgtttgattatacattacttacacagttattcaatctatgaattttccaaaaataatgggattgattacttctctggatcatattcatcgtcctgatgcgattgtccattattgttttgattgtttatttggttcatagggttaattttatttacattattagtaagtgcagcagctaattgagctacaagaagagagttattttgttgttgtggtacggcttgtggtaaattaggactgtatgatgaattaaattgttgtggttgagcttgttgtggttgctgagtttgtggatatgttggattatatccttgactgaatgatgaattcatttgtgagtatccagcgttatattgattatatccttgttggttttgattatatccttgagtatattgattgaatccttggttataaggtgtattatattgttgattattgtattgagaattaaattgttgaggatattgctgtgtatattgttgtccaaattgtggaggataactataattgttaactgcagtattgttttgtgaatatgcttgcgattgttgttgcattagtcccataaattgttgcatcattgcaacagggttttgcgccggtatattttgaggaataaaagaggaaggatttggaatttgtgaagaattgttctgttgatgtggtttgtttgaaacttttttaggtagagatgttagtctggctttgacagacagtggaacatcactcgtaacagagttatcaaatttaggctttttatttatgtgattgtcaatggagtcatttttggaagaaccatttgttttgtcattctctgaattcttggacttagttttcttcttctttttattctttttggacaaagcttccttctcatcatccgaaaactcttgttcttcttccggaatttcttcatcatgccaattacttgcatcagtacctttgaattgtctgatatgttgagtggaaagaaactcagcagatgattcaacgtaaaatattttacttccttttttgtctttgaaattttcagcttcttcactggtattaaaacgaattgtataaactggagattgaagacgccctatgacttcatacaacagaccaacaggagtacgatcttcaaagcaaaatatcgtaccttcgttcaaaacattgtattcagcactcatactagccttcaccaggacatttttatccactactccacttataaatccaatgtattggatttttgcgtcttcctcaattttgtaatcgtttggaattgaaggaactttgaagtctaaaatttcatttttagatacaatcggtgtattttcatctccttcgtttatctcatcttctaaatcattgtatttatcattgtcattattttcctcagattcagattcagaatcagatgaatccgaatcagaacttgagtcagagtcagagtaagaactagaacctgattctaattctttctcagatttagatacatcggattcatcataatcatcatcaccatctatattatcaccatcagattcttcatcagatgagtatttaaccactttgtcaacatcaaagatatccatgtcactagtttcatctctttcattagactgattttcttcttcattgtcttttttgtttgtatctgaatcactcttttgaatctcattatcagatttactaccctgtatttcatttgcaacaacatctgctttagatgattgatctgtagtgaaatcagttttcacatcatcatttacagtattttctgatgtattgatgtcattttgcataatatcatcctttgatatttccttaatttcacccatttaaaatttcagtaaataatatatcaggtattcctgttcactctaaactcaattaattctataaattgttaattatctagttatgaagatctaatatgcaaaatcattaaagaaatttgttcaaattttgtaacatgaaaaaatttccagcggatataagaagacatatttttttatagtaacatcgttaactcagtgactaacttgttctgctctagttctatttgagtactattgcagttttatttaacatccacatatacatattcagaagggaaaattacaactgtcattaagatatgatatctgatatcatattagaaggcttaaatgcccccaatgcatctaggataatctcatcccttatattcctcgaatcatcatcggagaatagcatttgcttgaacaatttttctaaaagtatcacctcaagtatgaagttagaattgatccaaaatacagataaaacaggaaacaagtctacaggctttgtactcaaagtgccttattgttttgataggattatattaaatcttgaaaataatgtatcactaaccaatgttagatgtatgttaagatcagacaggaatgccacatcattattccaggtgaattcacatgagattaagttaccattgaatgatcaattttctgggctcatagagttatcagtgtttgacaacgataaaaatattttaacttttaaattctatcgcccaccaccagccgataatttcaataaagatgtaagcacaagaagccatgaaagacacagcgaatccatcgatacctacaaccaagaaactaaaagaagctcatcaggaatagaaaaaaatatcaatccatttccaattcctatgcctgatggcccacttttcagggaagcaattagtatttatgaacaaatggcaccaataattcttcgaaatctacaatcaaatattgacaaaatgaataatttggatcaaaaaattaaaggcttggaacattcaagaaataatttaatggattctttaaaagatttccgaaaaggctttatgccactagtttcaaaacaagatttagtttactcaaaatttgaatcttcaaatacaaaatcgacagaaaatgatttgacatacatgtttttaaaagctttgaaagagtcaacatccgagacaaaaattgatttttcagcattgaaatctttacagaactttggagcatctaaaaggaattttgaagaagaaagtaaaagatactacgattggctttctaagctcatgagctcaggaaaatccaaggatgaaaaacttttaaccaagatgaaaaatttcaccatagttcaaatggagtattttaattatttatatgatactgttacaccaatgttattatcattggtaaagccaaattctcaacttagtaaagactattggaaaaatagacctcttagagatcgtgccatagtatcaatttcaaaatgtaagaccatggacgaattcagtattttgatgaagaacttttcaaaaattactcctactaaaaataccttattgctaattgatccaaactcatcctataaagtagattcttatgatactccaatcaaaacaggtcttttatttgtttttggtggtcagggaaagtcagggtggcacaagcaatggatcgtattttgcaatggaaaactttttgagtatatggattggagaaaaggtgctgcacttagaaatgctccaattgatatttcactatgtaatatcaaactgctagactctaatgatacctctaaaaacgtcgatattggttccaggaaaaactgttttagagtcattaactcaaaaggtactgaacacgtatttcaagcctttacaactgctgatgctaatgattggataaactcattaacagagaaaggtcaaatgttggcttttaagaaggatgttcacaaccaaagatccccaaacgatgaaaataaagattacaacagaattgcacaattatcaaattccacaacaagtacactgaattcccctagagttagacgtgtatcatcggtctctttatcattgctaaatattgttcgaatggcagatcaatcaaatacaatatgcgctgattgtggatcaactgaaaaagttgaatggatatcattgaacttgctggttgtgttctgtattacttgctcttcagcacatagatctttaggtacatcagtgtcaaaggttagaagtttaacattggatagctttgcagatgagaaccgtgtattggttcataatatcaataatgcaagatgtaacggagtttatgaagcaagtatgccatctaatattaaagcaaagccagattccgaatacgaaacaagactagaatttattactagaaagtatgttaaaagggaatttataacattagagaccaaaaagaatgcatctcgtacgctgatacaaggaatgagagatgatgatgttagtaaagtgttagaaggaattgcaggtggtgctaacgtaaatacaaagtttccatattcacctaaggcagattcaagagctagtataacttcattatccaaattagatcctaataatacaattgagatatcatttttagaatatgctttattacatcctagtattcttgatggtgaagaagtttttgacattgcagaattgttaacattgaacggatgcgatgcaggaacgcaagtaagaagtggttcacttgttgatgaaaaagcacgtaagtggtggcaagatagaattgataaaatgaactgtgctacatcttcaacaccatccaaacaaatgtcttcaacacctccattaacgctgaaaaataattatacttccaactcaagaaccagtatgtcaggtacaacaagaccatctatattaaccatgggaaatcacgggaaatttggctctaggtccaaattaaaaagtccaaaagaaagttttaatctgtttaaaaagaagatgaaaaacctggatcaataactgaaatagaataatgtaaactaaatgattttgtctttttgagttaataactaatattccaatatattactaatacctaatatttaatacctaataataattcataattaatcatgaatttttaacttttttaatatctatctatctattataaaattgtataaataaatcatagtttaattatagttcacacgatgaaacttttgacttatctatgacttgctcgaccagacatgattttttgttatctctacgatttaactatttcttttatcttttgatttgatccccattacagttagttcaataaaccgaaactcccaatttttatatgaaaacaataataataggattaacaggtgcatcaagttccggaaaatctacaattgcatgcattttatcaacgattttaccaaattgtcaaattattcatgaagatgattttttcaaacctgaatcagatgtaccatacgatgaatcaagaaaagatagagattgggattgtcccgatgcaatagattttgtcaaactgaaacatacaatcagaactttaaaagagccatcacagtatgacaatacgatagagtcaattgtggcagattcaggaaatggttactatgattacgttttgaagtcaacagaacctccaagaagtgatgcaagttttcaaaacgatgaaactgtcatccttaaagcaaagaaaagtgtaagtgagatacttgatagtaaatacaaaaataattatagaataatactattagatggattcttgctgttacatgatgaagagttactggaactttttgactttactttatttttcaaaacaaactatcaatcgttgaaagatcgtcgtgaaaagagacattatacagtaggcgagtctttatgggtggatccaccagggtattttgatcaatttgtatggccaggatattacatttatcataaagacagatttacaaatgatgatgaaaatgttgtaaagttaacaggcggtgttttaaaatccgacttcaaagataagtacaaagtttttgagttttccaatcaagataattgtgatgcaaataggttgatacaggatgtaatatctgttgtaacagaagaactttgataaaaattgtagaagagtcaattatgaaacttatctatttttagattacttaaaaatgcttatatataaatgtacacgattcacattacttttgataagtgaactctatttcttggatttcttagattttcctgatttaggcttttccttagcaagtgctttcatttcactactataaatatcatcagctgtttcagttggctttctcttagtacccttctttaaacttacagtacctttattcttaattgcacgatcaattgattttttatcagaagaccaatcacctacatctgttatcttatatttatccaaattcaagttattaatcaattctttttgtttttcttttctttctctgatagcttccaatgcttcagcacctgcagattcaagatcttcctctaattctctttccatttgttcaacatcatttatagtttcaacttcttcaccatttaactctctcatttcattatctataatttctggtagatcttcagcaactgactctttaactaaagatctaaaatattgtgagactttacgaataattttagagaacattgcaagtgattgattagttgcaatttttaattcagctgagattaaatctaattccttatgttgtaaaccgactgctaataaaatagcactttgaacatgtgataatgatatttcttctcttgcttgtccattaaagtattgatatgcaatatatggtaataaatcaagaataacatgataatcaatcaaattattagaatatgattcaagacgttttaagtcaaatggtgataaaactttatctaaatcttccttagtaaatttggtcatctcatcagtattaaccttacatgattctaaaacactcaatgcttgtattgatgggaaagttgaaaatccataacctaataaattaataaatctcttatggaaatcagttgcaaatgcatgtaaccatttagcatcacgaccttctaaagtttttaacataacacatgtatgttcaccagttaaatcgtttttagtttgtcttaaataaactggaacataattaccatgacgccagaatttatttaattgttgtgttaaaccatatgaaacacctaaataatgcaaatagtatggtgatttatgagctaaattaacaaataatggaggtaatttatcatctttacgtggtttaatttcatcacgtaaagaaatttcggtattttctaattcagcatctgttaatctattaattgagaattcatcaagtgaagataatgatttattattttcttctaatgaagcaaatttaccttcgaaataatcagttaataattccattgctcttgaaccataacccatattagtataatctggatgagttgcaatacgaacaattctagcacctgataaacttgcaaaatcatcatcttggaattgttgagagattaaccaaggaattaaatcaccaccggctctaataccacgacttaaattactacgaatactatcttttgaaatttcaccttctaatgcaatttgaataacacataatggagttggaattgaagcatctttaccaacatcaggaccaaaaagtgcatataattgatgagctggagcatctgacattaattgtaaatcatttggagaatttttataatgagaggagacaaatagtgccatcatacgttgaaggaaagcttcagagacagggtcataagagaataaagtatcacgattgatataaaataatgaacattctgaaggatgaggacaaccacgagatgcatacttagtatgttttgttaattttgcatcaagacataataatttattcaaccaagattcaactggatcacctggagcatatctaattggttcatccaatgtaacttcaactaatgaacgagatgaaatatgaagagattcgatatctttagagccatttgattcatcgcgtgaaataacttgagtttgagtattatctttaataatatttttagattgatctcttaattgttgaattaatttcaatgaaagggaacgaccagtaccttcataaccattaatagttgaggccatgaaaactaaataaggacctaaaagttttttgacaacaggtaaaggaattgcagcagcttcatcaataattaacaattctgcttgacctaaaacttgactatcagttggtgagatatattgaattgtttgtctatgacctaaacgtttaacatcaactctaacaattgccttattgaatgaaggattagtagattgaataatatcataatcttggtgttcaacataacccatagcatcaaaacctttaaagataaattcaaataaagttttcaaattttctggggatggggaagtcacaaaaatatttgaataatcttgtgcaatagcagcagaaatagcaatacctaaggaagcagatttaccacgacctctaccagcagttaatgcaacagttgaattaagagttttttctgcaattgcatcaataaatcttaaaattgcttcagcttgattaacagttttagctaaagaaactaatgaaccagcaggttgagtatcagttaaactttctttaatatcctttaattcttgttcttttggagtaatatcttcatcatcctttggaggtaaacgtttaacatgtcttgcaccagaaattggtaaaacatttaattgatcatcagcaactaaacaatttttacaatcagccaaagataataagaaacgttcattaaaacgagaaacaacatcattatgagcttcagttctatatcttgaatgaacatccattgtcattgtatataattgttttaaagatttcattgatttaagtaacataacgactaaaccaccaccttcaacagtttcaattgtacgtgccattaaatttggtgttaaaccttcaaaatcttgtaaaacaagcataccataggtattacctaaaatattttcagtttccttataataaacatatctaatttgttgatttgtaaggaaagcttcaaaaggatctaaatcatttgcttcccttgtaccacgtttaacatcttttttaatttttttctctctattaattctatttgatgtaaaacctaaaagttttttcttataagcccaaagaattgatttattcatttttaaatttgcattcatcattaaataatgtaaatttggaatttgatttcttgatttatcaccaactaaaataatgaaagatctttctcttgtatcaacaccattacgaattaatgatggaatacgagaatcaagaactttctttttggtagtattgttgatattagtagccattcttaaaaagaaaaagagaactcaattacttatttgattcctgagttcctgaaatctattcaatcaatcaaagtaaaatttaaaaaattatcacttgaaatttatttatttaaagatctttctaaaaaatttttttttcatgtagtaatagtagtagtataagttaaaatattatactcaatattacgtaatttttaaatttttaaaagtcacgtgaaaaagtttaaattttgcgacgatgggtcgacaagaagataatttttttgagctcctgtatcgatgctgtcaaattattattataagggagaattcacatgttaagcatgattataatggagttagtaaggatatttttatactattttgttttagtttctacatctattctacaagaataatatcaattattccgtgaagatcagttggaaacacatctgacatcacgaattacaacttttctttatatactttagaatgaaaggcggcgatttaaacttgaatatggcatcattctagtttatctagtaatgtttcatcatctttaaatttaaattcatcttcatcctcttcttcttctgctaatatgaatatttccaataataacaataaccaatcctcagtcttctaacatgaaaaaaactggctcaagaaatagaagttcaagaaaacgtaataacaacaaatctacttcatcatcatctaataaggatactaaggaatcaaaaaatagtggtaataataaacaaagacttcaattgaatgatgattctcaagatattatgtctttaattaaatcatctaaaagggcagttgatataagtcatttagttaattatacctatagtaatgataattatgatgatatcctcttctcaaagaccaaaatcttcagataaatctttaaatagaaaaaagcaatctaaatcatcatcttctcaaattccatttacatggtatgagttatattaatgccaattataaatttattttaaataatcaaggtgattataaatctcaattattagatccaaatttacctttaagtgttaatagtatttcacgtgtcgttgttaaacaaaatgattatcattgtccaatctgtttaggggatgaatttgttgctccaagaatgactaaatgtggccatattttctgttatccttgtattatttcaatgtttgataatgttaaaaatgataaaaagaaaacaactttaggtaatatgcataaccctgaaatttcatgtcctctatgttctgaagttttaaaagagagtttcattctattacctgtgttgattgaaactgttaaagaaaatgaatccttgattaactcaaagaatttttatgatttatctttgatgtttagaaataatgccaaaatctattctcaaccagtatcaaatttttatcaatttaaaggatttcaaaggaactataccttggattagtcatggctgtactcccttagattttaaacaattttcaccatatgtctctaattcaaggttaatattgtgtgatattcaatttttaatttcatgttatgaaaaagaagtggatgatttaatgactcaacaattaatagatatggaagtttatggtgatgcaggtccattctataatatagcaatagacagagttcaaaagagaatcaatgaacttaatgatttatatggatcaatggaaaagcctataagaggacctaataaaatcgacccttccaatttagattctcaattttctaatatgtcattaaatgatgttcaattaccttcatataatgaaggattctattactatgaatgtgatgttaattctcgtattcattattttttatctccattagacactcatgttattaataaattattcaatttacctgaatcaaaacttgatgaaaatgataaatcaggtataaatttacaacaatatgattacaatccagcttataatttaccattatcattaaagttatttgttgaaaatatcaactcggatgaaaataaagtgaacacctgagttggtaataaaatatccatttctgggtaatttaccatatggagctgaaattggatttcttgaaattgattggacaaaatttgatagttcatttattccaattgatgaatctttatatgaataaaatgaccggcaactcctcagatagttcacttgataaatatccaattcaaatcccatatcacttgaaaaagaaattatacaatagaaccaccaacattaaaaataaaagagttaatgaagaaagagctcgtgtacgtggtgaattaaggagagaaaaggaaacattagaaatatttaccagaaaggaagattatgaagaagaggaagatgaaaatttcgtttttattaatcctgataaatggagtaaggctaatccaaatcatatacatttaattgatgataagccagttttaaaaggatgtttcaaataattttaatgtattagccaatctaggaaatgataatgatttaagtaatgattcacgtgaatcaatcagtgctggtggcagtgctggtaatagatcaagttctaatcctccaccaatgactactaaaacatcagtttggggaactaaagttccaggttgtaattgatcttagaagaagaagcattacgtgaggaagaaactcgtcaaattgatgaactgattaaaaaagttaaagcagaagcaatggaaagtaatagtaatggtaaaggtaagaaaggtaagaagggaagacgtggtaaaatggttcctctaccactttaaatcactaaacttattttgagtttataacttatcagtatgtttttgacatgtttatgtaattatgatttttttagaaataatttttcacgataatactctaagtttcattatagctattcagactttctttctctatctacacaacttaacatgcttagtcgatatagcaaaagcataacgaagttatcctctgtatataaacatgaaattcattacataaaacctcaaattttgggtacaaatatacgattttattcaacgaaaaaatctaatcataaaaacaaaaaaacagatactgaaacatcatttatagctgaatctgatgaatacatacttaaagaactcaaaaaggaaatcaaacagtttaagtccaaaaaccaacaaattcctcagatcattgcacaatttaaagatattcttgcattatatgacttggaatttgttcaatgtccaatatcattaaatttagacattcaagctgaaaaaacgatacatttgaggaagaatagtgtggaaggtgttagaattgacttacttatagattttaagactcaaatagatgattcaagggaaattcaggtagttctaactaatgatagtgaaattgcaatttacatgatgggaagttttacaaaagcaaatggattttgttttgattcttgtatggttattgatcaaaacgggaaagaaataagagatgcaatttgtaacggtaatcccgagattttcaaatcattaaacaatcattatcataaactaatgaatataagtgatgaaagagttttacaatttttatcgattgatgaaactgatcctgatgcaattattccagaatttgatgacagtagaatgtttttagatgcaatggttaattacacagttgttaaaatgttaggtattcaaaagagtgatgttgaaggtacaaaattacgttcaattatttggatgttaggtacttattgtgaaaatgcattatttggtgattggttagaaaaacttagtaaatttatagaaaagaagtaattgaaatagaaatttgatttatagaatgcaaatactggacgatgttaacatgtaattgagtatgtatcaagcaccatgtagcaatttgactgtaagaatgcatcataccatatataatactaaatatcttatgtgattacgtaataaagttgtatatttgtgatttactttctgatgcataataaagacagcattgcatccactttatatcttctttatatagattggaaaacaatggcacaaaaggagaagtccgaaattgtcaaaggcccgtttaggaaatttgtgcattttaacacacagatttttgaaagtaggttttcaagtgataaactttcatcaattgggatccttactttatgtctcattcggatgtataattataaattaccagatgtaattttaccatctgaaatagaattaattgattcagttaatgcatacaatagtggtgcatatttggaaacggaaaatcctccattagttggattattattcactgcaatcagtcatgttttaggcaatgatgttgttaaactaagattggtgaatgaactatttggactgatgtcattcctattgttaaataaattactaaaatataatggtgtttcttcaatagtttcaaattttggaatgattatgctccttttagaaaattcattattcacacaattccaaattttaacaactgatgcaacttatttaatgtttattacatttttcattgcaaataataaattatctaaattaaaggtaattactaataaatcatggtttactcagactttactggcatcaattggtttaggattagcattcagtagtcattggtctggcatattccttttgttttactcttttgcctcatgtattcttgaattatggtacaattccgctgatcttactatttcaattaggagaacatggtacgtattttacactaaattagcatgttatatgataataccaatcaccatttatttatctacgtactatgcaaattttagtttactaaccaaggctggagaatcatataatcaattatcaccagagtttcaatattcattacaaaacaaccatttaaataatacttttcctaatgttaaatttggatcaagtataatgttacgtcattatcagaccggtaaatatttacattcccatccagattattatgccggatcaggtcgtcaacaagtcacattattagataattataatgacggaagtaatatttttgaaattcttacaatcaggggagttgacaaaaatttatttgattataatcgtagtgttggagtcccatggagagttgaattacttcacgttgacacaaactcttccttagtcattgatgaagaccataaaccaccaatttcagatcaagaatataataaattagttacaacagatacaaattatgaagatataccggaagaaaatcaaaaaactaaacaacaacttcaaattaaaatttcaggtaaatattgtaagactgatgaaagtaaaagatcacttcaagttgttaattctgtttttcaaatatataatgaacgtgaatcttgctatttacttggaaccccactggtattaagtgaaggattttcaactggacaaaatgaagtaatatgtatcactgaaccaaactatgaatcatcattatggtacattgattggaacactaacggaaactttcctgaggaggatgaaagaatttctctgaaagattacacattttgggataaacttagtgaagttttgatgagaaagaccaaaaagttgtttgttggatttctaggttacgatgttgaaactcatgacaatagtattaaaaactggatgtttatatcaaagggattcacccattacatgggcgagaacggtgcagtttatttattgggtaattttatcacataccatttaataattgcatccattatcatatatggacttttgaaaatttatgaattttgtaccttcagtccatttaatgaaaatgaaattaatgaagttaactacagatatgagtttgaaggatttgattatttggtaggatatttaatgatgttaattccaatgacatttgtcaagattgaacttcatttattcaattatttaccatctttaatttttggtattcttttcactatacaaacatatcaatggttatttgaaaaatccaagtatttgaccattgctataggtattattgtcattccattcatcatcttggcatattataagttcttaccagtcatgattatgggagaatggacatttgaaaagtgtagcaagttaatgatatcaccatcatgggacagtgaagtgtgcgaagtgtataactgagatgcctcttatagaaacgttatgtaaatatttagaatgaaaataataataataatattataactttttgctcccctttttttcttcttcctttatattaaccaaggattgtataatctacaatctagtcattgcttgttgtatttcttaaaatggttaatagtaaaagtatcattagtaactataaatttttagattgtattggacgtggtaattttggagatgtttatcaaggtattgatttgagaagtaaaaaagttgtagctatcaaagcaatcaaccttgaacacagtgacgatgatattcctgtcttattacaggagattaatttattaagaggaatgagacatgaaaatatcactaattggtacgatacgatagttgttgatgttaccatgtttattattattgagtattgtagtaagggtagttgtgcagatttattaaaatataatccgaaaggacttgaagaaaatatcgtttcgtatattttacaaggagttttgaaaggtttagtatatttacatgataataatattattcatcgtgatattaaagctgccaatattcttatatctgatcataatattataaagcttgcagattttggtgtaagtggagaaaaaattggagaaagtggaagaaagacatttgttggaacaccatattggatggcacctgaaataattagggatcgtaaatatttgagggaagatttttccaaattagaaagaagattaatagagaatggattaggtaggagaacattatacagaatgtggaataagaagaacaaaaagtatcttggagttcaattgagaagatgaaaattgaagatgaagatgaagatgttgaatatgatgaaaaagttgatatttggtcattaggtgttacaatgattgaattatatagtggtaaagtaccacacttctgagaaggaaccaatgaaggcaatatttgatataccacaaagagaaccacctaaggttaacggaggatattatatgaaagagtttggattagcatgtttatgtaaggatccatactatgagatcatcagctaaggaattacttaaatttaaatttattagtaagaacaaagtgaaaagtttggagttagataaagtgctgaatcatacaggtaaaagaaggaagccaaaatttgatattagtttccaaagtattaattatggtccttgtaaagattgggaggttagagagttttacgaagataatttaaagggagtgaaaactgacattgaagaatctaaaaaagaagttttagatattgatttagaagaggatactgatgtagattctgacgattttgataattctcaagaagccaatgaagaaaacgaagttattgatctatacagtccatcagatgaatcaatgatagacacattggccaattcattctttgataatcatgccaatatcaatcctacagcaaatacctctcctctgatagtgacagtatcgagtgccaagatatcagcagtgatgaaacgactaagagatcatctcaatagtagcaactgcaacagcagtgtaagtataaagctgagccaccttgaatatttattaagagacctgcgccacaggggaaataacagtaacggaaatgagaatggcgaagctatagtgaaagacgtggcgcaggttttagaagtaatgacacagttgatctcgggacaggctttggctgtataaaggagaaggttcttatctcttcttttatatcatcaatgatcttcttctaacgtatattattttgtcctgttaattaactttgttatagttataaaggtttgagtgtataagtgtttgctatatacttatttatacttcaactattctatttcttactattcttatctagtgaattctatcctaataatcaataatataacttctattcatatcatgcatgctcgtgactggctattagcattcatcggtatctttttaccatttgttcctgttgctcttaagagaggtatctgttcagcagatttttggataaatattgcactttgtttactaggttttataccggctttaattcattgttggtatattatttcatgttatcctcatgattcttcttcaagatatcaaggtgttacattacctggaagggaatcaaattatggttcagtagtttaaatttaatataatttaatttaatttaatttattttagtttctatttaccatttctaataaattgtatatttccaacaaaaaattatccttatctattgaaaatgcttagttttgaaaatgtacatacacaatacggctcatcttccttttacatgcacaagtttgcctgtaaacagagggaagattatactttcttcagagattactaccaaccaaacaacacatgacaaccccttaccatctacaactcaaattcatctaccaccacaatcttcaccacttaaaataaatctttcattcttaatcgataagatactcatatgtgaatccaatactccgaatatacacaattggctctttgcacttttatctaattctaaaatatggtctcatcttcaatatacagaatcgtttactaaacgtccatcatcatttacaatttctttaactgatactttatttgatgaaaatatattcacagatataataaatagcaaatttgaacaggaaaaacttaattctgttaatattgaaacaatatctgaaatatcaatacgaattaatattaattcaatatcagatttagataatttattacctgatttaaattatatcctatttcaaacatttattaaacttgaatcaaaatatccattgatatttaattatatatcacgtaaatcatatcaatcatcaatttcatcaattccatttattgtttcaacatttcataaatcagaggaaactcaattatcttatcaaagaagtttcattattggattatttaaatcacttaataattcaccttcatatattgatcatatatcaaattctcactatagcactgtgaagagatcattagaaaataaggatagttttacattatcatggttcgttttagattcatcacttcctactaagatttaatataaacattaaaatgaaaagtggtaataaatataaccaatcttttaaacttacccaaaacttgatcattttaatagctaaaattatatgataggaaattgttactatcatcaaaaacttaatattttcaataaatggtatatgtaatttagctatacataccatattataagtgaatacaaccggtgcaaataatgttatacatgcacatgcactgaataatgcattaataccctttctataatatggtaaacttatgaatgctgaatttaatataactaatactatcaaataaattctgaaaatattcttactaagtttttcattacttgtattattaattataatttcatcatcttcatcactactactttcgacatatccatacttcttctttgaaattttccttaatcttggcattgtcgtaatgaaaagaagattcaatgtctgctaatgcatgaattccgatatgcatgaaatttcgtacacgtaaaaaaaatattccaccctaccaaattcttacgtctttttattgattcctctttctttaggacacaatcaatggattatgattctacatacatgccactattatagatgcttcatcatacttttattactttcatgtacattgttttattttttttccataccaagatcgatctcttaaacaactcaatttaatcaatatcatttgaaatttagttcgattgtgattacatgaaaaggtacataatacaagacccttctctgaaaaagagggaacctcttcatcgtgtaagagcatccataattcaatcactacagattatttttattaactagtttcatgaaataccattgcacccatactataccctatttgataaatactaacaacactagttattatccaagggtataggatttttatcatctacttcactataccccccctgcgacctacttcagaacaccccttatattatcaattaagtctcataaatgtattatatatatttatattcgtatagaacgtgatgttatcattttcttgcgtgaggaatgatatttggaactaacaaaaggagttaagttattactcaaattggtacccatcatcgaagttcaggctctacgaatatttaaagacatgtataataaagggcgtgattttttcaaatagttcagaaaactttacatttctaaagttttttccttggttcatgatattataattagaattatcaaatgtgtgattttcgaatataatggtttgtgtgttatgatctttttgggatgtgaattgaacaaaattttaaattgataattgattggacatatggagtattggaaatatttagtaataacataatatacatgaaatttatttaatttaatgagagagtaggtcaaaaggatactaaaaatgatgataataataatgactatttggattacactacttttttctaataattttgaaatttcaaattgtttgatgataatggaattaggactatcccatgtgattgaagtacgcactgagtaggatatgatcaatgaaattatttcatgtcgaaaccattaatatgactcaaatatcggaatttctcttatgtatgaaaatcttattgtttgaatgactattattattcatcaatatttttgattctgaaaaaaagcaattttttttacttttgattgaaattttgttaagttctatataagtgaattagagagatagatgggatcttaatagagagaggttggactgaataagtgcagttgatgaagaaccataaccctgtgttctctattctattaaagtacgtataaaataccaatatcaagttaaaataccagaataaaataccagaatactaacaaataaattatacattacatgcaatctcttatatctaacatcaaattcggttagaagcggcaacaagcgttttttcaagggaagtcaacaaagtttccgcactggtttttctttttttcatttttcactgagatctctgtgtgtgtcatagagacttttggaaattgtatttaagagcagtaagtattccactgataaaaatttatttactccagagttttcattgcttttgatttgatcttttgatttgatttttgatttgctccttggtttgatttatatactatcaacaacaacaacaacaacttctcataatggtcaaggacttatcacatcttttatcagatcaatcaaagggtagacaaccttcccctcttaaatccgcttttaaatattacggtaaagacgatatcgtctttcttggtggtggtttaccaatggcagattatttcccttgggaaaaaattgttgcttattcacctgaaccaccttttgaagatggtattggtgctcaaccttcagtcactggtaaatctgttgtctctgaagttcataaacataaagttgaagaatttgatattccattagctagatcattacaatatggtaatactcaaggtaatcaagaacttgttcaatttttaaaagatcatactaaaatgattcataatgttccatatccatgaatgggatttatgtttaacaattggtaatactcaatcttgggaagcttgtattagaactttttgtaatcctggtgatgcaatccttgttgaagaatttactttcccatcagctgttgaaactgctaagaaatttagatgttgtaatttgttccagttaaaatggatgcttatggtattattccatctgcattagatgaattattagcaaattgggattcttcaaaaccaattccaaaattattatacagtatttgtactggtcaaaatccaactggttcttcattaaatgaagaaagaagaagggaaatttatgcaatcgcatgtaagtatgattttattattattgaagatgaaccatattatttccttcaaatgaatgaatatgaaactggtaaaaaaactgaattaaaggaacaaactcacgaagaatttttaaatgcattagtaaaatcatttatttcaatggatgttgaaggtagagttttacgtttagattcattttcaaaagttttagcaccaggttcaagaattggttggattgttggtcaatctgcacttttagaaagattcattcgtttacatgaagtttcaattcaagcaccttcaggtttttcacaatcgaattgttcaagctttattaggtagatggggtcaaagtggttatgttgattggttaattgctcttagaaaagaatataccattaagagagattttacaattcaagcattagaaaaatatatgccagctgaagttgtatcttggactccaccaattgcatggtatgttctttacaattgttttagatgctgcaaaacatcccagaatttaaaacctaaatataacagtgatccattacaagttgaaaatgctgtctatgaacatggattgaaggatggttgcttaatgattccaggctcttggtttaaagctccaaatgttccaaaaatctaatgagaacaactttcttctacagaggtacatacgctgctgttccattagaaactttaggtgttggtttagaaagattcgcaaatgctgttaaagcagaattcggtttataaatttagaatagatataatattagaaaataattagaacttaagtaatatttttttgtataactactatattatttaaatagaaatcctgttactttatttacattttttttgatttattaattagaagaagtttttaatttttatccagaaaaaaatctatacataagttatattattaaatttaattaaaatattaatactagatttaagatttgagtaacctttaaagatggtggtaatgcttgaacaagcttctttgccttaccttcatcattaacaattaaagtgtataagttcttggtacctctgaccttgaatttagtttgtttaactttcttaccgttagctttgacaactgaattggtcttgatggttgcagtcttaacatcggatcttcttgctaattcaacgaattgcttgatatcggtaatttctctctatatttaaaaaaaggacattgtaggggggatatgtatatgttagtatattgttcatttagttttgacattaattttctctattaattcttgtacttattccatttattgtagaaattcattattttgtcattaaaacatgagttttcaatatttctaataatttcaataagtgtacatgatagattattcatttgaagtatagtatatgatacgtacagccattgtatataagtgaactcggttgtttcaaatgaaaggaaatttcaaagagttttcaaacagattcgaacaaattttcagtaaatttcactaaaattgaataaaaaatgaatattttctctcatagtaagagattacctaccctttctctctccctctaaggctgagagcgatattctcattttttatttttttactatgggaagaaatctcatagtgcgtgaaaaaaatagattgggtaaaaagggttaggatagaccttaattatggcacgtgattagtagacttacctaataaactatcagtacctgctacatgaatttaaagtgtactttgggttttttgtggaaatcatcaagagcatcctttctatatatgttcaagaacagaagagtcaaaggacgtggagagaaaagaactcgtgatgatgttatagaagataatgatgtcgaaatcaatataaaatcatgttaagaaagataattcacttgattccacaaatactgataaatcagacactgaaacaagtttggataaggaagataaatcaaatgaatcaaactgtcgaaatggaaaaggatatttttagaccagatacaatgatcgatgaacttcatcagaaattaaaagagaaatgaaaagttattaagtggatcaaaagaaattcaaaaaaaagatgcagatggcaataaactatatacgggaatgatttcaacaaaatcgaaaaaggaagttttagttaagcctgtaagtagtcatgtgaaacaaagttttgtagttgattatcaacgtgatgtttgtaaagatttcttgaaattagggtattgtggttttggtgatacattgtaagtttttacattatagggaagaattccaacctaatgagaaagagcatagtaatgaatgggaaatggcagcctaagaaaaagagaagattctgattctgattttgattattattaacactaatttacacatatatggtttatattaagttatttttacatatttttacatttaatgaaggtatcatttagggaacaccaactatcaattattactttcttaacatttttatcattttgaccctttttaactgtgttcatgtttgattcattaatcaaattatttgttaagattttcaatattctatcattaccacaaatgatttttaattgatcgtttattattctttcatcatttattttttcaatataccattcatttaatacctcgatccaacaatctaacattatatcatatgtatagatagattttcacactatggttcctcatttcagttgtttcaccatcttgatcttttaatgtatcattatctgaaagaatttattaataaaattaatggagtaccatcccccttcattagtattgaatcaattataacattctcaacatcaattttcctcttaatttcattagtcttaacgatagttgtcaaatgagtattaaccaatggtgctaaactaataccttctataattgacttaccactaaggaacgaaccattgataacttgaaatttccaagaataaattaaactattagagcagatacacataatatattctttattacaatgtcaatttaacaacatttgaacctaattcaatagacccacataattgtcttccagttgttgaatatattaataaagtgcctgtatctgtagacatacaccaatatgaaagatcattattgatgattcttctaaacatgtaattttcttattgatgaataattgccatttctctaaatttgaatttatatttcttgtattgatagtggaaatagaattaaattcattccaagtattatcaaaatcaacttcacctctacttaaatatttgtaatgattttcgaattcaaatctaacttcaacaatctgttcaccattatcctgtaacaatttattttcaatgagtatattagaattcgattgtttctctccgaaaatagttctagatgaaacaaccgaatctctcatccaaccaggatactgtactctcgaaactctattataatctaatgatttattattattaccaccaccatttgatgcattattagacctacgattgaatgtacctgatgatggtcttgatttagtagttgttgaaccattagcgttattattattttgatgatggttattattattatcagcaatataatcaactgaatctgccgaactctcaagttcagatatatcattttcaagattagttctcattgatgaaatgaatgtaggtaatccatttttaggtaagggtggatatggaactgacattattttatttagttttgatcttttacgtgattgtaatgttgataatgtcgatggtttcgttattggtttattaatagtttcaacagttgatgatgttgctaatgatggatactgatattaacattggtgcaactctctttttacctgattttgtaattgtaatattctgtgatttagctgataattcattaactttaacaggttgaatagtgtgttcaattggttttgattgaggtaccggcatttgtttatttggatgttttttagatcttggaattaaaacattcattacctttgaatgatcttgtgaatcatttaatgaagagttaacatctttttcattcattaaattcttcaatcgatcagattctgttttattcaataagaattgtttattaatattcgtatttttttcagcaatttcctctaattttaattgttcaacactttcagggaagaataaatcagtatctttaccataacgtattaaaattttactattttcctcaattggtacaactttacccaattcactttcatcaaaataaactgataaaactacaccatctaatccacaaaggaaaacgtttaaaccatttgaattccatgaaacatcagtaattgatttagctgaaatttcagttgtaacacaaagaggagttggacatgatgaactccaaattgctaaagttttatcctgacctgcagttattaaaacagtttctgaatttttatttgaatcaacattatagagtcttggactaaatgaacaaacttctgaaggtaaacgatgaccaattaaacttaaatcactttcccaagtaccacgttttataacaacatttgcattaataccttcatttgtaccatttggagctgcaatatataaaccatcagggactccaagaacatcttctaaaataagtagttaatggagcttttttaaaaggtttactaataacattttcaattacaaattccatatcattaccattaccatcaacattaacaccacgtctaaatctgaaaattctcattgttctatcatctgaacaagttgtaaaatatttaccagctggatcaaatacaacacctttaacatgactttgatgaatatcaaattttttaattttttcaaatgttaaaccattccaaacaataattgatctatctaatccaactgtaactaaaattgaaccatcaggtgcccaagccatatcttgaacatcattatcatgagcaactaatcttttcctaactgtccaatgttctaaatcaatatcatcaccatctccattaataccattaaattcattattaatattattattcctatgagatttcattattttagtcttttcttcatctttttcccaaattaaaattaatttatcatcactaccagaagctaaaaatctaccatttggacaaaatctaacacatgtaattgcaccttcatgtcttgacattgaacataatggtctacattctgatttatcaaattcaatattaccattattaatttcatttaattttttaaatttatttaatgtttcaattgaccataatttaactttaccatctaatccaccagttgctaatcttgaaccatcaggtgaaactgaaactgaataaatttcaaaatgtcttggaccttccgtatgtttaacccaggggaatttaacaatacgcattatttaatagaaatgtattcaagatttgatctatgaaacatgaaagtctaagtataaccaacatcatactaaccaatactacatcatacatagtaaaaatcatgaaaataatgtaaatcgcgtactgttacaaattatagaataggaaatattaatatttattattttaaaataagctacaaactaaaaatttacttaaaagataaactatacataaatgtattgaaattgaaattaaaatataatcaagagatatttcatcataaagtgattaacattataacctaattgactatatacaccatgtatcatatcaccaccatcatcaccatacattcacatcattcctttattgtagacacagacaactcctccgctgacaccagtcgcagcctttaagttaaaaggcgcgccacattgagcgcggttaagagcatcttccttattaatagcaatgatgaattaaatgattttaacagtaacaattgaacacatacatgtaattaacaaacattggttatatttatcatcatatgatatcatatcccatatatgatattttattctcaagttttccatcttttcataaacaatttgtaacatcatcagaatggaaaaatgcttgcatcttcatccatctgaggaaaagaaataaaataagtaattttttttgtgatctactttattgaaaaagacaattgaacaacaaacaaaacaacatgaaaaacaacataaaaacagaaaacaggaaaagtaaaacaagaaccaaccaagaaaccaattaaatagaaaagcaaattgtgtattattatgatatatttattattaacaagatattgaaatcaatattgatattaaaaataattgaaaatttaatcatcaagtcatgataaattcttctaaatcaaatggggcgttgatattttcggttgttaatggtgctgcggaccattattcatatttgtaatttaacaatattattattaaagtcctctcccaagggtatttaatgtttttttttatttttttttaaaaatttattgagttactttctttttcccacaaattaaactcacccaatcaaaaaataaaatattgtaaattacaaatatgataaattaaagtgcattactgctgaatgcacactattaaacaagccgaaaaaacccatttttgaatcatcattatcattttcttttggatcaattgaagtttcatcataattattaatatttggatttgtataactataagtatttgataaattgaaatctggttcaaatgtatttaaactaataaaatcattagaattaattgaatcatcatctaatgtaaaattgagaagattatcagaattattatcaagatcattatctattggagttgaaggtaatgataaatcattaaattgaatggattttgaaggagatgaagtagaagaatataatgaaggagttaatgaaggtaaatcattaatttgaaaatctaaatccatatttaattgagaatcaaatgatggattagatggggataaaacaggtgaagaatcaattgaagattctaatttaatttttttatcaacaggttcaacaatattttcaacaacaggttcattaactttttgttcatcattattactttcgtcattactttcagtttcattttcattttcgttttcaatttcttctttatcatctttattaatattttgttcttcatcagataataataaatcatttggtctttgaattttttcaattaataataaattattatcaattttaatattattttcagataatttattaaataatagagattgattttgataaatttcatttaagtttgattctaataatttaacataagattcaagctttgcaacatgttttctctttttttcacgagatgcatgagctgctttacgatttcttaaaattctttcgattctacgttgttccttttcagcatcagttctagctctctttcttggaggaagattaccaacaattgatgaattatcatttattgtttgttgagtatttaaattattatttttagtagatttagtattaggagaggacatttttttttaaattgggtgagtttttagttatatactaggataaatgtggtgaaagttaactggtttcaaaagaaatcaaaagaaaacaagaagaaataatgaaaaagaagattgatcacaataaccaaacaatagaaaacagtgaaaaaaagtggatcccctcttccttttatactctcctaataaaataaaacgccaggcttagcgaaatctcacgttttctaattttatctaattttatctaattttagctttactgcttgtttcacttgttatagggctgttattattatcattgtagtatttttatttgctcgtgtttttgtacttggttaatacaagatagtgttcatgttgtataatctgtctctatcagtatatacactactacttagataatatagtgtattgttaatagactattatactaacaataagacattatctccgttagagtatcattgtaatgagggaacctaggagattctaaccatagttttttaggtaaaagtcaattttcaccatagtccggattacgtaataaaaaagataaaaatgattgtatactgcttctctaatgttgccctgtttggttaagttaacataatatcccctcttctctgtttctttgctttgccactttgatgtttttctttctacaacttgaacagacaatcagtgatgaaacatctatgtgtgaagatatgttgttaaaactttcaaacattgatatgggtgagtattaacttactgctcatttcaatttttatttgaatttattggataactattacttgattgaataattttaacacatttagtatcaattggttgttacactttaattaattaatccctgatgaaattaaagccttggaagtaacattgattaatattaaagatgttgaaactatttaattgattagtagtttattcattgcaacttcaaagcacaattgtaatttgtatgggaaatgtagaaagtgtttcatcattagataagttgttcaatttttttttacttcttgctgaatggtaataataaggtaaagacaaaaaagaaagatgtttatgctttggtgttgtttgatacaccttgttattatttgatattaatctttgtttctttatcgtattcttttgggttgctttttgttcatttggatggttactaatagttgaaatttattgccatatggttgaatgttgtcgttttgtttcattgtagttgttgtttctacttcttcttcaattattgatgttgcttgatgttgttgggtattgtttgttattgctaatttgatctttttttctattctattaaggtattggtattatttaatgctactatggtgcttataattcaatgatatgatgttaggtgtattgaattcaatgatttaattgctattttacaagaatttttactatttttactaattttcattgatggatacctggataaatgctgagcctatgggtcaattaacatcttagatgtattgttgatacttcaatgtatctgctggcatatttcttttgttatttaagctattaattaagtgtataaagtcaatttaattctaacctatttaactatgaaatattacataatcactataaaactgcttacctaataagtccgagttcattacgtaagcgtgagtttactaaggaaatttgataaaattcgactaatttttactaacaaatttacatagtaaaatggcttctgcagtaccggggtcaatgttgccagagattttagaagttattttttgacaatgtgcgaaatttataattaatcaaaatagcaaacaattgttaagtttagactttttcatataggagtctaatgcttcatcaatactaacaacattctcaacatagttgtataatttagcagtttcctttgtgactctttcagtcttgtaatataatttataaccaaaaatcataataagataaacgaaaacaccaatatatgatgtaataaattgtttatattggaaagttggaataaatgcattgtaaccattgaaaaatgtaataatagagagaaaaaaaattgtaacatacgctggatatggttgaaaccaaattctaaatggaatatcttctcttggaactttttggaaaactgttgcatcataataggtaatataagcaattaagacattaatccatgttaacaaaccaaaaactgaaactgcactggccaagtagccaaaaatagttgctgaagaatccctacaattcatatatgctaataaaccaaataatgcagtaaataatgatgcatagtatggattaccatttctatttaactttaagaaaatctttggagccatgccatctctagcaagaccatataatgaacgagatccaaggtaaatatcagaattagcagcaccaccaacaaaaaataaaagacatgcattaacgaatgatggtaaaactttaattgaagcagtttcaaatgcgatgacaaaaggtgcagcagctgcatttgaagcagtacctaaattaggattaaatggagaaacaactaagccgataaggaagacacctaaaatataaacaccgcaaattctaaaaaatacttgcctagtagctgatgggacaactgtacgtggatctggagcttcaccaaaaatgataccaatacattcacaacccgcatacgcaaagacagattgaataacgcatgcccaccaacctaaaaatctacctttattaccttccaataaatattcaacaaatgcttctttatgccagtattggaaaccaatagttgcatgatttggtccaccaccagcggtaataacaatacttgtaataaaacaaatagcaagagttaataatttaacaacagatgtccaaaattcaatttcaccataaatacgaacattgaaccaattagcaaaaaataataacaacatagaaaacagtaataaaaatacctggattcaaatcttttctccaaaattgaataatcataccaagagcacttaattcagcaggtaaagtaatagcataagtaaaaaaataattccaaccagcagcaaaacctaatgctttatctgagaatcttgtacaataaccagagaatgctttatccataggacaaaaagcagcaagttcacctaaggaaaataaaacaatcataagaagagagcctgtgaatgtataaccaataaataatgaagctggtccacctctctttaaagcagtaccagaaccaataattaaaccagtacccaaagcacttgcaactgccatcatactgacttgtcttgctttaaaatctctctttaaaacttgttcatcagtatgttgaccattttgatcaactaaaatcgagcgatttgaatcaagtggctcaatatcattcaaaccaaaagttgcttcttcaatttcactaataacatcaacaccttttttaccctttctattataaaaactttctaacattaatgatttgattcgaaaggttttttttaatggtttaaggagcaaaaattttgattattacagtttatcttattatacaaaaatgtggggaatcagctattcaaataatggttaaatattgtacccctacttataatatgttttttgcgatttattacagaaatcattttattttctgatcattatcattaaatttagttaactttaagataagataagataagataagataagataagataagaccagatcagatcatcatataagataaggtaaagtaaggtaaagtaaggtaaagtaaggtacggtaaggtacggtaaggtacggtaaggtacggttagattacaatcggatatatcggattctaagcggcattacatcgatatcgatgatcatctgatttttccagacctggggagggatttttatatcagttataaaaaaaaagtctatttaagcttgttaattttccttttttagttcaccacttttcgttttctactttctttcctctttcctccttttcttttttatttaataaaacaagcaaaatagtaatattagtaaaaaagatgtctacttcattcagagcaattggtgttattgattacaaggattggttaaatccaaaggaattttcctacgaaccacaagagttacgtgataatgatgttgaaattaaaattgaagcatgcggtatttgtggttcagatattcatgctgctaatggtgattggggtaaaccatatgttccactagcagttggtcatgaaattgttggtagagttaccgctagaggtccaaatgctagattccaaattggtgatagagtcggtgttggtgctgaatgtgattcatgtaattcatgtaaacgttgtgaaaatggttatcaaaactattgtaaaaaacaagttggtacatatcatggtacatatgaagcaactggtaaacattcacaaggtggttatgcatctcatgttcgtgttaactctgagtttgcatttaaaattccagaatcaatggattcaaatcatgttgcaccattattatgtggtggtattacagcattcagaccaatgatgtcatacggtgttaaaaaaggtactaaagttggtatcaatggtatcggtggtattggtcatatggcaattttatttgccaaggcattaggtgcagaagttaccgcaatttcacgtaatggtaaaaagaaagaaatagcattatcattaggtgcagatcattatatttccactgatgaagaagattttgcaactaaatatgaagattcacttgatttattaatcaatactgcatcatcattcagtgaaactgcaattggttcagttttgaatttacttgcaccatatggtcaaatgattttcattactgcacctccagttactgataaattaactctttcaccattccaaatgttactcaataatatttcagttggtggttcagcaattggttcaccaaaagatatcgaatatatgttagaagttgcagcaaagaatgacattaaaccaatgattgaaactttagatattaatgaagcaaatgttaaaactgcttgggaaagaatggttaagggtgatgttagatttagatttgttttgactggttatgacaaatattttggtaattaatgaaagttagttttttaaaattatagttaaattttttttttaaagttttgtattgttctatatacaagatgaattatatttacaatcaaatcaaattatagggtcgtttatccagtatactggcttttaatcgtatttttctttgtttttcagcaatttaacttatacttttttcaaaattattcacttagcataatatgtcttaaaaactcataaaattttccaagtaccattaaaaccattaaaatcattcaaatttaagtcaaagaagcaatccagcataaccaacaactttcaaccaccatcgaaaacacatatcatttcaccaattaactgcaacatcttcaacaatttactcagtagcattatcttgccactagtttttccaatcaattacaactttcatcaacaccatcaataatcattcatttaccataatacttgtcagatattctgaaaaatacagagagcaacatagacaacaactttttgatgaacgaaatcaacaaggagcctgctacctcgaccagaacctcattccacaatcattggggctttatccaccgacagccgatacttctctcaacaacgacatcacggtgcagataaatcaccatctatcagcctctcctggcttatacaattaaaataccaaattttcctcttcaacagttggaaatgaatgaacacatgtcactttcatcatcatcaaccaatcccaaaccattaccatctacaacaacattttaaaaacaaacatagatacattagtaccgcatctttcacatgattgaaccatcaacaacatagtaagcaagcttggaaaagcttttttacaggatcaataaattgcaagaatactattatttatatgcacttgacacagacatactaataatacatcctatcgcagctgtttatgtgaccttccactaaatgaaatcccagtcagacatgttatataaatcattccaaattcaccactcacatattcaaattttttaacatcaatctgatcaacaacactcatggaaatactctattaatatcctaatctgtccatcaaagtcacaaacatcatcattcctttttctcaataatttcatcagatttcttgtcaattttcatatagagtagcttattctacgagacctaaaatattaaataccgttaatgctaccaccttgtcattatttcctctaacatttcttttacgaaatcatcacaaatgcttatcaatttaactactatttactgttcttttttcaaaacaaagcttaaactggaagctctattcgttcatttgtttttcaagtcttttttcatttaaatttacaattaaacaaaaggttttaatacccaccgtttcgtatatacttcgatactattctatgttcatctctcaaagataatgaattttttcattttcacttaaaattacttaaatacacaatttcaaggacttttaaagcgtttttttgaattaaaatttaactgtgctgtggagagatgatttcttaacagtttaaattcaacagtaatcaaaaagaagataaattgactgaggtaataaacaataaagtgttttaaaagattgaataaatcaccaattttttactagtaaacgtcttaatcagttaagcctttatcttatcaaaattccaggaatattacgtaaccattgcggattttgtaaaaaatgatcaaaacccgctgcgattacgtaaaatttactacaatttttccaaaattgattacgtaaacgttgttttttaataatttgcttacgtaatcataagtccatttcactaaaatttaagggtccccagtaaacttactgggggattttttcgacatttttaatactacatttaacactataaaaattatatcattagaaaggtctatgtttgttctataatctagcaaatggagaagttttaaaattgcgtattgaaagagttataaaggtgtgaaaattcaaaaatctcggcataattcaaattttaaaatttacactatgtaaaaaattttgaactttcccactatattataggagatttttagaaatggctataaagaaaagagagagagagttgttaaaatttttactgtttctttctctagaactatcttcaaatgtctgcatcacctgtaactaatggtaatgatggtgtatctcaaccacttggatcttctacaacaaataatgatactaatagtaacaataatatcacaaataacacagataacatagctaataatgatattaataatgatttagatgattcaactaatgtagcctatgatcaagatgatttacctatacctcaaggtattgtagatgttaatatagatcaattagatcaaaatgaatcagttgatttagatttatcaaattctaataaacaaatttggttagttcgtttaactcctcaattagctgaactttggagaaatgatgaattcttaaatggtcaattacttggtaatattaaaatacctaaaacttcttttatggatccaaataataataataacaataataacaataataatagcaactcttcaacttatgcttcacctcagcaacaaaaaaataataaaattctattagacttaaataaagaaatacctgaacataaaaatcttgaaagtcaatatgaattaaaattaattaaacaagttgttgataatgaatatgcatttagtgaatctcaatttaaacaatttaggaaacgtttaatgtatagaactcaagtcgttaatatgccagttcaacctaaaatgagaactcttaataaagaagctttaaatcatgaagcaagttggactagaaaagttagaaattataaaaaggaagctcaatttagagaaatgatggctagagatccaaattataaaactaaaagatcagagagtggtatgggtacaacttatttatctgatgatgatacatttaatccaaacaataataactcaaataacaacaccccaagcattgatgaagaaaattttgattcaaatgatgaatttggtagtaattcaaataataaatttaaacgtaataataattttaagaaaaatccaaaatttgaaaaatttgataaatttaaaaaatttataccttatgcaaagacaattcctaaaaaaactgaacttattggtaaaattgttcatgaatgtcaagttataccaactaaattagttgctgataataaattaagaatgttagaacaacgtagaagattaagtcaaatggctaaaaagaaaacaattaattatatgaaatcagaagctgttggtataatgcatggtagaacaactccaaatattcaaacaggttcaacaattacattatctaaggaattagcaatgaagaaagaagctgcaaaacaagatggtcgtaatgcaagattagatcgtgatgttttaatgaatattttatttaaattattcaatgaatatgaatattggactttaaaaggtttacgtgaaaagactaatcaaccagaaatttatttaaaagagtgtatcgaaagtattgcagttatggaaaggaaaggtccttatgcattgaaatggagattaaaggatgaatataaaaagagtatagatgttgaaaagaaagttaaacgtggttctattgaagatgatgaagatgctgatattggtaaaaattctgataataatgaagaagatgatgaagatatgaatgatgttgaaatggaagatattgctgctgtttgataaatgtcttgtgtatactatcgtaataatctttaaaaagaccttttatacagtattgaaataaattttactatgaacttactctgcgaaattaattatataccgaatgatcttttttttgccttgaactcccatatttactcaaacttcttctttgatatctacactatataacaacccattgagctactaatatactatataaaaaactttattaatcaattatatcaatgtcgaaggaaaatattgaaggcgaatcttcaaaagattcaatttcaacttcaattacatcaaattctccaacctctccccaatctgatagacgttcttcaatatctcatatagttgatgcattatctccaaatgctgcagtaatatctccaacaaatacaaccgttacatcttctactatatccagtcccgaacaaagtgaattgacttcaactttacataatttagaatcatctgatttgaaaactacagttaatgaaaatataaataaaactaacgataataataacgacaacaaagaaggcaaacctaatttaaatgaagaaactaaattaataaatgaacaatcaaatccaattgtttctataaaatcacaacccggtgtcaattttatcccaactgatgaatttcaagcttcatttacaggtgtaacaaataagaatacagatcctgtctcaatggttttacccgatactactgaaaaattagatccacatttgaaatcagatagaaatttatcatcaagtggatctaatgttattaatggtattggcgtagcattgggaatgtttaatgacaccaattcaacagccaatactaataatgacaccaatgaaaaaaatcattcaaaaaataatttagttaaatcatcgccattattatcatcaactccaccaacagttagtaaaagtctaattagatcatacccattcttaatattggttttaaaagtattgaatattttaacatggaatgatgactcaaaacatctatcgatttttttagttttactaactactttttcaatattatattataaacctttgatcatatatttaggtcatttattaccagttttttctttatgggtttattctgaatgtaaagcatatatcaaggaacaacaacaagatttttcaactttagatgatataattcaaacaattacattgatttcacaacgtgcagatattttagtttctccaatagttgaattagatctaactgctggtgacttaaaaagattgcttttcacaacagttttcttatcacctatttatgtcgttataagtttctttattttaccaccaaataaaatgttattatcattatcatttttagtacttacatatcattctaaatggtccaaaattacaagaagtttgttatggaaatcaagaagttttagattattatgcttttatttaactggtttagattttgaaaattcaggactgaataagacatcaacattattcaacttaaacaagaaattatcttcaagatttgggaaatcaaataattcaaattcaccaaattctaacaattccaataattcaaaatcatcagtttgttttacttatgtaatttatgaaaatcaaagacgttggttaggtgttggatggactccaaatttattatcatatgaaagaactccatggaccgatgaattcttaaatgaatcagaaccaatagattcctttgaattacctgttttaccattatctatagatcttcaagataatgaagaagaaagcgttaatactaaaggaatggtatggagatgggttgataaaacttggagattagatttaaccaatgatggtgctattcaattaccatcaactaaaccaagaacaacagctaatcctaaaacagatagtggttggatttattatgataatacatggaagaatccatcaacggaggatggatttgctaaatatactagaagaagaagatggataagaactgcagaattagtctatgttggcaaagagagaaataacgcaccattaaaacttgattctaagggtaaaccttctaaaataaataatgaaacatctgtacaatcaattaaaagtacagggaaatctgtaaattttgctgatagttcagacaaggataatgatgttaatgaaagtgattctaatatatcgattgaatcaaagactagaaagggaggactgaaaaaatcagattctggtgaagttaaaaagaggaaatctttaagatttgaagaacctgtttagtttatgtactgtaatgtgtttaatgtaattttaaatataataaatttaaagttatttttgactatacaagatatttacaagaatattataattaatcgataatctttttagcatacatcatcttttcttcagttgggttcaagaatctacccttcttgaacatgtaaatcaataaaattgttgatgcaactgaaagagaataccaagtaaccaaataattcatgtgattgttcttataatcaatctttggaatttttcctaatggaacaccagcattgataaattgtaatggatcaaattcatcagcggtatcgaaaggttttgatgtatcaataatatctggatgataatcattatcgttatttaatttacttgaatcaattttaggagatgatttccaaaatgcccaactactagtctttgcaacagcatcattaacagtatctgataatttattttcattatttaaccattcaggtctatcatggaaattttgaagaacttgtaaataaacatttttcgtacctaattcctctgccattgcatcagcatctaaatattgatataattttgaatgtttttcatgatctaaatggaaaatacctttagttggggcaactctaacaacacattcaactgttatttcaccctttggacgtgataaatgttgtaaatttcttgattgtggtacaactttatcggcagatatccaccctctatctaataaaacatcaccactcccattactttgaacaaatggacatataagtgtatagcctttcttaccatcatgtaatcttggtccaacataaacttctctactataatcaaaatgtcctgtaactaaaactttcctatattcaagatttggtaaatcttcctttgttaaattttttggtaatggaattggtttataagttaatctatcttcacattctgcaactaattgattcttccatttaagtcttttaacttgccaagtacctaatgcaaatgtaataattggtgctaaacataataaaccaaagaaaactttcctacttttagttcctgaaaattcaatgttttgtgataattgttttttacttttcattggactccaatcaacatttgctgttttaactgtagcatattttcttttcaacgttttaacaggtacatccctaactttaaatagtttaaatactctattcatggctaacgggcagtgcttttgaaagaaatacaagcgttaatcaatgtggagatccaatacaactaaaaaaaattatggcgatgttaactaaccaattttcatgcaggaactggtttcctttctatatttctattttatttattacaatctgatatatatacacattaatatacattataaagtcttagatacatcaaccgcagcttctcttaataactgaagtgatgaaacgtttcttctttcattcgtaaaacatacttcttcccaaacactaccatgtaattttgacttctcaatgaacaattcctctaattctttcatctcatctctgctaccaaatttaagcaaaaatgcataataaaatatataaccatcaccatagagatcatcttgacccaaacaagctttaaaaaattgatatgctctatctattttcccagatttccacaaatctttagcaatagtgagtacaactattggattatctttagtctttttcaatgctgatgaataaacatttttaatttgttgttttgttgcaagtttaatattatcacaccaaagtaatggagatgttggaatgattgataatcctttggctaataatctcaatgcatgatctttcttattaacctccatttcgagtttaattttggagtgatacaatagatcagacttcggatgttttgttaaaccttcatccaagatcgatcttgctttaattacatttttattgagcttgtaatggtaagatgaaagtgcaatgtagagtttttccttggcatcacataatttgataccttgttgataaacttcttcaacagtatgatgattatcaccagataatataagatcacctttagcaagataaacgtttggctcttttggatacacattcaaagcttttttaagtgttttcaacgccattgagttattaacaaatcttttctcaatggaaacttttttcaagaagaattcaacacttggtgtggatatagcttccagacaatcatctaataaatctaaaatgatttgaattgatttattatgtttcatttcaaagtcaattgcataaatccataatttttcacttttaggatttttaattaatgcatcagacaatgtagatttaatttgatcaagatcaaaatcatatttaatcttatcattaatgtaattgatataaagatcaacattatcaggtaatgtagatatcgccatttcataagtaataaacaaatctttgtattcctttgattcttttttgaaaataatccattcttcccagcctgttacaaaagaagggtatgatgctgtaacaaagaaaaataatgcattagatattatgggatgattagaatgatgatatgatttagctttctctattaaagattctgcagattctttacaattttgtaaagtttgtaaaacaatttgacgacaagttaatggataatcgtttttttcacagttttcagcttgttcaaaccagttaatatcattttcatctttaacagattcaaatgatttctttaaataattttcaattttaacttcatttgatgaaaatttttcttcaattttggaaatttgtatccatataaaatattgattcgccaacgggaaattatcaactcgatttctcaatgtttcaattgctgttttggaatcttgtagttccgataatttaaacaacaattcaatagaacttggaattaaagttattgccttttctaacattttgatagcaatcaatttatcactttcagtttctgcaattttcatccatagttcagctgattttggtagaaactccaatgctttccgtaaaattctcaacttagatatattatcagtttcaaattccactgctctaatccaaagtttcaatgatttgtaattatatttaattgcatctgccacaataactttacttgtaggaatatcattagaattgatttctaaattagttagccatatatcttcagattttggacataattcacaaccttcctgtattatttctttggcctttttaatctttttggcatcaaattctaatttagcacttgcaatccaattttgtggattatgaggatttaattctctaagttttgtaaataatttccttgctttcttataatcaccaattttatattgagaattattagtttcttgtaaactttctaaataagtatttttatcaatttcatcattagataaagttactttaccacctaatcgaagttgtgtctctaataatctatccttggcaagagataattcaaaaagattgacctttgaatctacttcaacactattattattattgtccttcaaatcgtcctttatagtatcattatcaatctcctcattatcattacttaaagaaaaatctgttgtacctgtattttgaagatccaatgtaattctatctgaatttctataaaaacgttgttgttgttgaagttcatttcttaatcttttatttcttcgtgtaaaatccccagattcaggtaaatttaaccattgttcctccgatattgtagccaattcctctttaacatcttgaaattgattagaaatttccttcaatgaatatgctaatgagtttttatcaatatcattggtttcatcatcaacattagtgtcatcatttttacgtttaagctttttatttctttgattttgtaaatgttgctcaacttcattgtatattttatcagcttcaatattctcttgttctgtttttgaaagaatttgacgataattaccattactaacatcatcaaattgtccattattactattatcattattatcatctattttttcatatgttgtaataggtaaattttgtgatatttggaaattatttgtagttccaaatccagttgcccctctaccgataccagcaatgtatccaggaggaggctcctgatccaagaaatcaagattgatcatcctacctgtgtataccttttagttgatgtctcttttaagactgatctttcccagtataagcagatccatatagtaacatactaagtagagaaaacggaaatttcatggagatcccaaaacttctgtgaaatttccgaagaacaaatttttttttatttttcacctcaaaaaaatttatttttctatgaaaccactttaaagatgtagaagtttaaaagttgtagaattttcattattttggtaaagcattaagattacaatgtctaaaagaggtgcatctgaatttgaaggagatcatgctgaaagtaagaaaaatacagcaaataaaaatgtagatattgaaatggcagatgatgtagatgatgatattgctaaacaattaggtattgaaggtgaaatggaaaatttatcaggtgatgattatgatagtgaaggtgaaattattgaattagatcaatccgatgaagaattagagaattctattgatcaagatggattaattaataaagttaaagatcaaacaaaagaaggtgaaaatggtgaaaatgaattatatttaccacatagatcaagaccattaggacctgatgaagttttagaggcagatccaacagtttatgaaatgttacataatgttaatatgccatggccatgtttaacattagatattttacctgataattatggtaatgaaagaagaagttatccagctaaaatgtttgtaacaactgcaacacaagcatcaagatcaaaagataatgaaatgataataatgaaattatcatcattatctaaaacattagctaagtcagaggaggatgaagaagaagatattgatgatgaagaatgatgaagaagataaatttaatccaattttagagagtgaaactataccattaaagtttacaactaatagaattagagttaatccatttgcaagtaaaacaaatgaatatttaactgctacaatgtctgaaaatggtgaagttcatatatttgatatttcatcacaatttaaagcatttgatacaccaggttatattattccaaagacaagtaagagaccaattcatacaattaaaaatcatggtaatgttgaaggttatggacttgattggtcatcagttgaagatggatcattattaacaggtgatgtttcaggtagaatttatcttacacaaagaaataataataaatggcaaactgatcgtacaccatatcaaattaatgattcatcaattgaagatattcaatggtcaaaatcagagaagacagttttcgcaactgcaggttgtgatggatatgttagaatatgggatacaagaacaaagaaacatacaccagtcattaaatgttttagcatctaaaagtgatattaatgttatatcatggtgtgataaaattgattatttattagcatcaggtcatgatgatggatcatggggggtatgggatttaagaaattttaaaccaaataatcaacctaaaccagttgtttcatatgatttccataaatcaccaattacatcaatttcatttaatccattagatgaatcaattgttgcagtttcatctgaggataatacagttacattatgggatttagcagttgaagcggatgatgaagaaattcttcaacaaagaaaggaaagtaaagaattagatgatattccacctcaattattatttgttcattggcaaaaagatgttaaagatgttagatggcataaacaattacctggtactttagttagtacaggtactgatggtttaaatatttggaaaactatttcagtttagttatataatataaatctagaaatatgtacaatttaatttataatcttgttaacaaaaatattgatataacgggggtatacaaggtattcatataagactatccctatgaagatagtaaagaagaattttcatcaattatattgtgatgatttgcattaagtaaattttcttcagcaatacgtaattcagcattagcttcagttaaatctgttggataattcaattgaaaatatatacacattgaaagtaataataattgtaaaatagctgatacgaaataaggtaaccaagaactccaaactgaatttggttgagcccataaagtataactccaaagaaatccaccaggagtttgaatcatcatcatcggaacagataaactacctggatgtttaacattgaaagtagttaataattgaggtaagaattgtaacagagcaaataaagttgataataaacctgatatattagcaaataacataagtaaatcatgattgttagtgatcaagtgttaaaaatatgagaattgagatattaatcaatatgtaaaagatgaaaattttaaaatatattactaattgatgatgattaattggtggttctcttaaagaatttgaagttgcaaaaacacagagaatgaaaattaaaatacaaccaattgcttgacttaaaatttgaataaatccaatcattgaatttgaacattggaaaaaattaagagatgaatctacaacaatctcttacatccattgttactatataaatattgatgaaaggcagataaagctgacagagaacctaaaagtagataagttggagacagaccttcacttgattttctccttatgactttaatatgttgtggaacatacgaaccaaaaatccccaatgccatcaccaccccgacagagagtgacagcactgtcgggatgttgaaacactgcacagtccatcgtcaatagtctccagaaagattaataagtttcctaaaagagcaatcagcagttatatactagtagagaagtctcatgtattaatgtaaagtctttacgtaagcagagtataaataaccgtgcaccataataaattataataccaatatttaattttctctctttaaattttttgaggggagagtaatagttaatagagttgattctactggtagaatactataaggcatacttcattagagcaacaatgacctactcctactgcttttgctgaagctgcaagattctctgtcaccaatgcagaactcagattacgtgtgttgaacttatacagaagatatcttaagacattcaagagaattcgttaatagttatgatttagatatcccagcttatcaagtaaagactaaaattagacaagaatttgagagacatagatttgttcaagatttagcaattaaaaatgttctctatatgaaaggtcaaatggaatttcaagaattagttaatttttggaaacaacaatgtcatgttatgaaatattttgaagattttgaacattatagttcagtatcaaatgattcattcgttcaaaaattcttaaaaggtgctactcaaacttagttctagtactaattaactacatacatacatattcacttcccatttttatactactatttatttattttcttaaaaaaaaattatcaaatttaaattaaactactcattcattcattcattcattcattctctaaatatgatttcatctttgtaagacatttatgtgtcatatctttatcaacaatctttaaaaatctaactaattcaaatgctgtatcaaaatcttttgatataattaatttctttaatattgtaacaacaatatcttgatcatctttactaatctttgattgtttatccttattcttattatttttattattcttacccttagattttggtctcttaatatcaactatactataattatctcccaaggtatcatatttctcataatttaacattataatgaaaaaatgtgctgtaagtctttgattattagattctgcaaataatttattaacaatatatcttggcctctctttactcttttcgaaaaatattggccaataatgtgtttctgtctttttcaaacaattaagtattatatcataaattgatcctgtaagtttaattaataaatataatctatcaaaatattcattttgtaaatcaaattctttattatcataacattcctgtaaataatcaaccattaatttctctaaaacaaatttaaaattcttaaatttagaaaatttttgataaactgtcttaatattaattgcattagaatcttcctctaaatgtttaactttaatatttgattcaatataatgatcaacaacatctgataaataatttcttctaattgtctctaattttaaattaactctatcaaaacattcaacttcaattccaaatacaatattttgaaatggtatagtagtaatcggatatggacaaactcctgaatatttaacaattgtctccgtttcattatctcctgtgataatatcatttccaatacttatattaatagattttaactttaacatatcaatatcatcacttaaattataatgtaataattgtgatccatcaaataaacaaattaatgaattatttaatttatgaacatattcaacacaatcattaattaaataaatattatatgaaaatgtaaatgatttgggcattttctccctcttaatataataaagatcagtatttgttaaaaataatatatcagtttcattaattttcaaaattgtaccataatttaaaacaattgattcatcattctctttaaaacatgcacttaattgataaactgttgatttttgaataattattgatgatctcattaattttaatgatctctcatttattaatttatgattattaacgaattcttcattatttaattccctatcctttaattgttttgataactttaaattccatgtataacaattaatcttattagttataacaaataatgtatcagtgaaaatatcaatattaaaattaacaaaattttcattatcatatggtgtatcaataaaattaaaattccaaattataaattcagaactaaaattttcatgtttctccaaaatcttgtttgaaaatataacaacttctgatttattatcattattttgttattattaaaggcaccattattaccattattataactattaaaacctaatattaaataattattccaccatagacatttccttgcacttgtctcaattttttcaaatttatttgttgtatcttgattaatttgcaaaaatttccacattttagttaaattattgaaaattataatatcataattaccaattatacaaatataattaccatcattactaacacttgttgatcttattgtatgattatgtaatctaaatgataatggtaatgattcatttaaccaaatttcagtttccttatttgttatatcatttatattataattataatgatgatgttcaattaattttttttcataacctttgaaaatatgaattttatcattatcatataataatggacgtttaattagataaaaaattaaatccttcaccattatttatcactgttaaagaaattgttaaaatttcatttgaattgttgataattattaaatttttggaacttaaataattaattttattacaatttgtaattttcatataatcatattcaaatgttgaaaaatttaaattacctaaaagtgaataaatattccatccattatcaaaatgaactaaaaatgaatcaccattgggatgtaattgtaaatttaatggtgttttagatggcaaacatttctttatccttttcaataatttaaatgtaaaattatcataaagtttaaaaaccaatatatcaccattccctagtaatagataaaccaaattctttaaatgatttatcaatcctttaacaacttttatattgtcattcaattcacatttgaatagacatttaacattaaaattaaaatttgataacgattccccagtatgatgagcaattaaaacatcagaaaattcatttatccataggaaacaattaagatcataattatattccattttattaatttctccaccattattacaattaacatctttaaaccattcaaacttctttcaaatctctataattactgtctttatccttaccttcatcattattattttgattatttaaattaattatttgtaatgaatgtggatctttattaattaataataattccatactacttgtaaaacaataatcaattacatctgttgaaatattcaaaattaattttaatcttaaacctaaatcataaattggtacttcaccatcatcaactccaataaatgaatcaattaaatttttaacaataccattattaccactggtactagtattattattatattaacaaattttttattaataccaccataaccaaatgaatcatcaacataatcacttaatggataaccattttgaacaatttttgaatttttatcataaattgtaagcaattcactatcactaccatttaatttaaatgtataaatcagtaaaatatttaaatttgttaaaattgcaattgtttgttgatttggtgataatttaattgatttattataaccaaatttattaattgattcatttgatctaatatgtgcattaattggtactttatgattccaatcaaataaataaattgatctataagttataataaaatatggtaaattatttgaataatttgttaaaatttcaattatttcatcattatgaggttcaggtttatattcatgtttaactttttcattagaacttaatttatttaaatcttcagtttgtggtagtctttgaatagtctcaattgatgatggccaatgcattgtcaatagaagaagttgaagttaaactggtacagttcctcaaggaaattggtgaaaaaatataagagcgtgtgggatcttctacatagtaaaataatattttttaagattattagatactagatatacatttaagacaaaatatataataaattcaactatcaatgcttgtttggaactaaaatatatatacgtgtatattacattggaaaagtaattgaattgaaataaaaattaataatattattgattattgaatatgaatatgaatatgaatatgaattgagttataaactatgattttattaaatttattgattttattgattgacattaataaatttctaataaaccaaaataaatctctaagaaatggaatccaaacaagcattgtatatgtagatgaaattttatttgagaaagagaggttttgataaaaagataaagaataaaagtagaaaagttgaagaggaaagaaaaaagaaaggaaaggaaagaaagtgaagaagaaatgaaatgaaagaaatcaaaatgaaacgaaatcaattaatttattcatctatttgattttgttcatcaaaatcaagatcatcatctaaacctgttgcatcttgatattgttgatattcactaactaaatcattcatatttgattcagcttcagtaaattccatttcatccataccttcagaagtataccaatgtaaaaaggcttttcttttaaacattgcactaaattgactaccaactcttctaaataaaccttgaattgaagttgaattaccaacaaaagttgctgacatatctaaaccacttggaggtacagaacaaacagatgattgaacattatttggaatccattcaacaaaataatcttgatttttagtttgaactttatgcatttcatcttcaacttctttaacacttgcattacctctaaagaaagcagcagcagttaaatatctaccagttcttggatcagaagctgccatcatatttcttggatcaaacatttgttgagttaattcaggtactgttaaagatctaaaagattgggaaccttcagcggttaaaggagcataactaaccataaagaaatgaagtcttgggaatggaactaaattaacagctaattttcttaaatctgaatttaattgacctgggaaacgtaaagaagttgtaacacctgacataactgatgaaactaaacgatttaaatgatcatatgaaggttgattaatttttaaagttctaacacaaatatcatataatgcttcattatcaatacaaaaagtttcatcagcattttcaactaattgatgaactgataaagttgcattataaggttcaacgacagtatctgaaacttttggtgatggcataactgagaaagttgccatcattctatcagggaattcttctctaattttagatataagtaaagtacccataccggaacctgtaccaccacctaaggaatgagtaatttggaaaccttgtaaagaatcacaaccttcagcttctcttctaacaacatccataactgaatcaactaattctgcaccttcagtataatgaccttttgcccaattattaccagcagaattttggccaaaaattaaattatcaggtctaaataaattaccaaattttgaagatttaacattttcaattgttgcaggttctaaatcaacgagtacagctcttggaacatatttgccacttgaagcttcattataataaacatttaatcttgatttttgtaaatcattagtaccaatataattcccattagcatctaaaccatgttcatcacaaatagtttcccaaaaggcagcaccaatttggttaccacattgacctgttgataaatgaatctataataaataaataataaataatagtaaataatggaaaattttgagttagtattgactgtgcaattaaaacaaaaacaaaaacagggaattcagtatactatattatactccctccctatacccttatacaatacatacgatctctctcatggcagtgacttgtctacagacacaaaccaaacaagactcaaaagctcctaaaagctcaaaacaccaaaaccaaaacaaagcgaaaaatcaccaaattttaaaaaatccgctgcttaaattaattgaaaggtaaacacagtgattacataaggtcttctactattactactatggtacatagatacgactgaaaccttcaacttcacctctgcaacagacacaggttgcaaattctcgtataaataatgatactctgcaactttcacagatagcctaaacatcgacatggccataatactatttgtctcgaattttcatgacatacaacacagatacctaattgatcatcattaatttctttacatgaatcatcattattacaaagtatctttattattattattattatttaccctctttaatctcctttcaattaaataatcaagtaatttcatatcatctgtataatatttggagaaattcgatctagttaattgtgatattggtacaaattccttttcgtgactcatatgatacgtcataatatgttgttctctcatatcagtaagtatatgattaatatcattattagtaaataattcttgtatttcttcatctgatactatagattcattgtctgttggtatatcttcatcataatcatcttcattatcatcatcactttcttgataatcattagattcatcattttcaggtaattctgtatttagtagtaattgtgaatacagtttattaagatcctcatcattaatttcatttatattcaatttgtcattattattattatcattatcgttattatcattatcattatctaaataaatacatttaacaccattatcatcctcaattattctatacttaaccactttattattattattactattattattatcattaattctattattattccttttcctaaagatacctataatctttaaaactattaactttataaatttcataaccacattattgaacattttcaaccttctgaatataacccatttgaaaacactaattttcttaatttcatcattttgtttttcaatattcattaattcaggattattaattatttcattattataaccattcatactcttacttttatttattttattcttaatattattaatttccatttgaataaaattatcaattggtaaataaatatttgaagtttcccttatataacattgattaattgataaatttaaaatgaattcaccaaatttaattaatgcagtataaaaatcatcagataatgaaatattaattgaattccaattgattaataaattatttaattaataaatcattaaatgaaaatttaactaaacctgtagttaaataaattaataaacttaaaataacttaaatttaaaatacaaaaatgtggtaaatatccaataattataataacaggtaaattggaaattgaaccattaatgaaattatatgaataaaatcctaatgtaaataaaccaattattgttgaagttattaatttataattaagtaaattaaataatcctaataaatgaatatttaattgatttaaaattgaaattattgcaattattaaaatttcaattgaaattgaattatcattatcagtagattttctcaatttcttgaaatgctaatgaatattcaaataatgttatacctgtctccattgaaggttttaaacctgatgcaactgatataaatgtatcaaatatttgactaatacataatgataaatgtaatgattttaatatattatcagtagtactagtactactactagtagtattataatcccataattttaagaaaatttcataactaccaattaataataaataaattgcaaaaattcttaaaattatattagaaattaatggtaatctattatttcttctacttgatgcaaatataacaattctattcattataactagcagttatcatacacatcattgaaaatggtgacatccaatatgaaataaatgcacttgcaccttcattattgatattgattattattattaatactattatcctcctttgattgttgataaatagcatttgagaaagaatctaataatcgtacaataacccaattagattcaatatctgatactgtatcattaccagacatcgttgtcgttccctacatgataagaaacccattcataagataaatgactcctattaataagacataccaccactttgaaaaaatttaaaacttcctacgacgcgtcgggtggagttggcattaatttaaagtctattacagaacatgaatatattatatcattatcttagttgaagaagatgataagtatacacggtagagcataggagagtttcttttgtgatacggtaatgggaatatagtaagatatttaatagaaattaggaataatatgcattttaatcgtattgaatcaaatattggtgatgataatgataatggtaagatttacatataccaaataaatcatatgactgaaatattagaagtttgtaattcaaataatatttcaagacttaattcattaaatttaccaaatttaaagaaatttacaaataatgattcaattgttaaattagatgaaggttcaagtggtataatttttaaagttaaattgaaaattgataggaaatcatatgttttcaaattaatgaaaagtgaagaagatgtgaataataggggataaattggaaagtaaaccattatcaagatcatcatcaaataagagtaataataatagactgaatttattaactaaatccatttcaaatatttcaattaattcaacaaataatttagaaaatatatcaccattaaagaatcatcataataataatattgacgatgagaataatgataataaaataattgaaaagaaaattaaacctgattatactttcaatacattaaatgaatatcttattataagtaaatttaaaaccaaacatataattgaaagttatggattatttagatatattgaagatgaagtagatcataatgatacagaatcaattgatagtgaaatatcatcaaatgatgatcacccacaaatatttgataataaaccaatcaatattggaattttaattgattatcatcaaaatggtgatttacttaaattaattactaatatacgtaaaaaaaatttaataatttcaaataatttaaaagattttattatgttacaattagttgaaggattaaaatttttacatttaaatgaaataattcatagagatattaaacctgaaaatattttaattgataatttaggtaaattaaaatattcagattttggttattcaattgatattaatagaattaaagattatcccataaatgatgaaaattttttaattaagggtacaaattcatttaaaccacctgaaattgttaattttaaaatattgaaaaaatttcaaaatgatattattaataatgattgtaaaattttgaaaaaaattgatatttggtcattaattatactttattatcaaattaaatttcttaataaaccatggaatattgcatcaattgataatgataataattttaaaaaatttaatgaaaaatatcaattaaataaaattaatttaatgaaaactggatttgaaatgagtagaaattttaatttaaatgaaaattttggtaaaaatattaattcattaaaggatgataatatattagttttaatgaatatgatgaatcctgattataataatagatgggggataatggaggtttatagatcaaattggatgttaggtgttagaatgagtttagaagatagtaataataataaaagtggtattaagggtaaggttgaagagaatgaaattgtgaagttacttcgtatagtttagaattttgttaatgattattatattaaaaaaagctggatattatataaattattgttaactcttatttgttgaatgctgtgatagtaattttaatgataatagtaatagtaatagtaaaggtgaaaaaagttatgaaaagataagataatttgagaaaagaaaataattgaaaataagtgaaaataagttaaattgtaacgataagaaaagatgagataatataagataagataagaaaagataatggataatggataatgatcataattatgataaattaatgtgtatatttgaatcattattatcatttaaaatattgaaaacatttaaataatttttttcattattgataatatttggtaataaattattattattattaatattaatattatttgaaataaccactttatcaattaaatcaatttctgaatcaatttcagaatcagaatctaaatcagaatcagagattgattgtgagggagaatcaagaattaattcatgtaaattcatatcagaagatgaattattatttaaatcatttaagatatctaaagtttgatttaggaaagataaatgtttttctctattgatattttgagtgttaattttagtgttgttattgatgattttattatcattattattattaatattattaatgtttaaatcaccataaatgattgataaattaatatttggatttgtaaatctatcattaataaaagtaaatttatttgaaattgaattatcaggtattgtaaatggggagcaaagagatattaatgaatcatttgaaataattgtttcattaataatttttttttgctgagttgagcctgtgttattattattttgattaattgaatttgaattttttgtattaattgaagatgattttttcttttgattgttattataagagtttctattatgatgatatctattattattattattattattgttagtatttggaatgatattattatttaattttggatttaaatgaataatatcagaatatttactattattattattattattactattataaaaagcagatctatctctctttgaaatatgagacattgttatgaaaagaagatgataatgtaaaataagatataagataaataataaaataatataaaaaagcagaaagagtggcaaaaaagccaaagattataaaaatggggggaaagtgccctcttttgtacttattctaaatctaattctaaatcatttaatttagttaaaggggtgtataatagtgtattactaacactaatttcactagtctattaaaattacccttttaagaattatttagttaagtactcttagtatattattattattattattattacgtaatattgaatattatcttatcttatctttactatcttatcacagtatcatagtatccgctccactgggtcgatgggtcgatgggtggatgggtcgattgttgggtcgatgagactatcattattatcattacataatcaatataaatataagacatagacccttaaacatagacatagacataaattaatatcgtataatactgcaacattgctatatattattatgattattattattgcttatatgtatttacacggtttatcttatcattgctcttattttattttatcttgtttttatttgtttgtctgtcttattttaacataactatcaaattcataagaacaaaccacccttttttcagctctttctcataaacattcatattcacattctctatctctatctctgtacattagtcaattatcattttcatatcatatcatttcgtatatttataaatctttacttaataatgtcttcattatatgcatcaaatctttctcatgaagatttaaataattcaattaataaattatcaattaatactaatttaaatgacgataataataatattactcattcaaattcaaattcaaattcaaatcctaattcaagtttaaatttatcaaattattttattttaaaaattaaaaatttaccattggatatttcaattagagaagcttcacttattttctctctttgtattaatgatgtcttctttattgatataattaatgattcaatatcaaatttaccaataatttattcaaaattttattcaaaaaatatcgcatttcaagttttcaatttattaaataataaacaaattttcggtattaattatccaaaaattatttgtgaattaattgattcaaataatgttttcctcaattccaattccaaattcaattcctttcacttcaactcaaaataattctccaatttcaaaaaatgatttaaatcttaattcaaatcttaatattaatacaaatttaaattcaattcctctaaatactaccaaataattcatacttatttaatgatgatataataaataacaacaatcctcattcacattctcctactaataatacaattaatgaattatcattattattaaaaatacctccaccaattaatccagctgatcaaaatcctccatgtaatacattatatgttggtaatttaccacctgatgcttcagaaattgaattacgttcattatttaaatctcaaccaggttttaaaagattatcatttaaatcaaaacaaaatagtacaactacaattaatacaaacaacactaataataataacactaataatcatggtccaatatgttttgtagaatttgatgatattttattggcaactaaagcattagctgaactttatggtaaaacattaccttgtcaagaaaataattcaaataattcttcaaaaaatggtataaggttaagttttagtaaaaatccattaggtgtacgtagttcaaatcaacaaagaagaaatttacctcaatcaaataataatactgttaataataataataatactgttaataataataatactattaataatactattaataatactattaatactacaaataacaatcaaccatcatttcatagaactaattcattaccaattcaattaccaatagttaataaaatgacaagtatatcaaataataattcacaaatacctccacatacagctaataattttcaaaattttaataacttaaacaataattacaataattttaataataatttcaatattaatagtaatattaataataataataataataataatttactaaatataaatatgacaaatttaaataataatcttaataatcaactcaataatcagcttaataatcaacttaataattacaatttaaatgcattaaatctgaatactaaatcttataatgaattaaatcccaataattaatatgaacaaacaaactgcttctcttttttactcttttactttttacaatacaataaattgtttcttataatttcaatagactttattaaagtcattggattataatttcacaataattaaatgctatattatattatcccctgtatactactatttaatttaactttatacattgatcaacaccttcataattaggtacttcaaacccccatttatctgcaatatttttacttataaatctaccacctaaataatgatttgtaataggagaaattttcaatgaacatggtttaggagctgttaaactaattaacatatcaggcatataaattttcagtaattgaatctttaattggtccatcatcaacatcccatccacttggtatatcaactgctataattttcttatcattattttcattcttagatttaattattgttgataatattgaatcaaatggatctcttaaaggaggatgaaatgaaaatccaaacattgaatcaataattaaattagaattatttaaaatctcattatttaatttatcattaactacaatattaaacattttcaattgattaattaatttatcataaaatggatttttacccttaattggataaattacattaattttttcatatccgaataattttaaatgtcttgcagcaactaagtccatcacctccattattaccaggtccacagataattgttgcatttggatacttgattggattgtattctttataaatactttgtgcaactgataatcctgctaattccattaattgttctaatgtatatcctaatgttgacattaatgatgcatctaattcagctgctgttttggcacttaatggtttcatcatttgtgtgtaagtatgcgttgtttaaaagaagaaaatgattgttaaaaattcaatcttttctgaaaatcatgttattaatcgttaattatgtcatcccccgcaataacattttttactcagccgccagctaatagggcatcgattcatttcagtgagttatagattgattatttgtttggctgtttttcttttcaatttctctatgtatcatttgaagtatcaaaattatggcactatagatatttgtcacatagtagattatcatcaactcatcttcaaatgatgcattagaaaagcagttactttatgaaatattattgaaggcttatcatcaacataattcaattacaataatttaacagctcataatactatcatccctttccattcaatctttgaaacattatccattccatcatccccataataaaatattcctcatgatcacatataccacagagaagaagacatatagagaagtacttgtatcttatctcctataataaagagttcccataatatacaaaagatgagcctcctatattcgacgcgtactgtgcaaacgcgttacttttttgaaatttctcaaaaattcaatttttcgttcttaaaggaaattgaaaattaaacaacgaatcaacaacaaacaacaccctgtttgttattgttattgttgttattgttattggtaaatatcaccgtatctattcacaatgacaggatatgttcgtaagaaagataatagaagaggtataaggtttaaccttttagttactggtaatcaagggaacggggaaaactacctttattaattcattattagatcaaaatattttacctcatagatatcaatataataataagggaataatattaataatattaatagtaataaaacaataccaaaaacaattacatactcaaatatatctgcattaaatgcaattgatttaaataattcatttgatccaacaaattctcatttagaacctggtattgcaattactgaaacatcagttgaaataattgatgatgataatacaaaaattttattaacaataattgatacaccaggttttggtgataattttaataataatatttgtattgaagaaatttgtaattttttagaacaacaatttgatttagttttagctgaagagacaaaagtcaaaagaaatccaagatttgaagatacaagaattcattgttgtttatattttattgaaccaacaggtcatggattaaaagaattagatattcaatcaatgattaaattttcaaaatttgttaatattttaccaattatttcaagagctgattcatttacaattgatgaattaaaaaaatttaaaaaaaatattttattagatattgaaaaatttaaaattccaattttccaatttcaaactgatgatgatgaaactgatattgatttaattgaagaatcgaaatatttatcaaatttacaaccttttgcaatcataacttctgatttagaaggtataattaatgataaaaagacacgtattagaaaatatccttggggtataattgatattaatgatacaaatgtttctgatttcccaattttaaaatctgtattattaggttctcaattacaagaattaaaggatattacacatgatttcctttatgaaaattatagaactgaaaaattatcaagtgttgttgatttgaaaaataattttactgattcaacttctaatgaattttcatctcaaataccttcaatgtcaaatttagctgaaattgcaaaatcacaagtcaatggcaaaattcgatttacaagctaaaagatcaaatattgatgaattatcagaatctttagtaaaatcgactattgatgaatcaaatataataaaagaagaagaagaggaggaggatgaggaagaggaagaagaagaagtggatgataatgaagagaaacctattgaagagcaagttgaagaatcagatattggaaatattacaaatactaccacaatcggtacatcgtgaaagtttacattctgaagtttcaaatgcatcacaatcaacattaattaaaccatcaataattaatagaagtgtaacaaattccccacaattatcaattaatagtaatattactaataatggatcatttattggtaactttcaagtaccacaatcacaaattgatgcaaaaaaattacgtaaaattagtgatacagttccatatatgttaagacatgaaacaatacgtagtaaacatgcaaaattagaggaattagaacgtcaaagtgcaattgaattagctaaaaaggcagaagaattagaacgtaaggcaagagaattaaaattacgtgaatcaattttaagggaacgtttggaacaaagtaaagctaaatcattaacatcaaacagtgttgctagtgttcaaagtgatgttcaaagtggtattcaaagtgttactcaaagtgaaagtcttgataatgataataatgatgttaaaactgagacaagttcaaataaatttattgattctactgatgataattagattaaatcttttataactgttataactgttataattattataacaataaataaataaatacctctatcctattaatatatatcctactcttatcttattggcaaggtcataaacgatattaacggcctattgaacgtaaggcacacgatttattttgttaaacgcggcggaagttacctcagaggttatctttaactctttatatatgacgacttgtttcctttttatgtgtatacttggggaataacacattttattagatgaatattctgaaaacacaagcaaaaatggcatctaaagcaacttcaattgaatttgaatcattaactaaatggacaaatgattttaaatcagatattaaaacacaaattggtggatcagttttacaacattcaaatattgaagatgttttaattaatagagaaagagaaattaaagatattaatgttttcaataataaaattgaaattgaaggtttaccagttatggatcaaaaagcatcaggtagatgttggctttttgctgcaactaatttattacgtgtttatgcaatgaaaaaatataatttaaaagaatttaaattatcaccttcataccttttcttttatgataaattagagagagcaaattatttccttgaacaaattattgatactcataaagaaccaattgattcaagattaattcaatggtttttaactgctcctgttgaagatggtggtcaatttacaatgatgacacaaattgctgataaatatggtattgttccagatcaaatttatcctgatagttttaatacaacaacttcaagaattatgaataaaatggttaatttcaaattacgtgaatatgcaatgactttacgtaatgcattatcaaagggtgaagatattactgaaatgaaattagatatgcaaaaggaaatttatcgtttacttacaatgtttttaggtaatccaccaaaacctaatgaagaatttacttgggaattttatgataaagatggtaaatatcaatcaattaaatcaactccaaaaactttttcaaatgatgttttagaatttaaaacacctgaatatatttcattattaaatgatccaagaaatgattataataaaatgattaaagttgatagattaggtaacattttcaatggtgaaccagttaaatatttgaatttagaaggtgaaaaattagctcaagcagttattaatcgtattaaaaataataaaccagttttctttggtagtgatacaccaaaatttatggataaaaatcgtggtataatggatacagaattatgggatttccaattattaggttatgatattaatacaatgtctaaaaaggatagagttttatatggacattcattaatgactcatgcaatgttaattactggtgttcatttagatgataatggtaaaccaattcgttatagagttgaaaatagttggggtacaaaatctggtaaagatggttattatattatgactgaaaaatatttccaagaatatgtttatcaagttgttgttgaaaaggatgaattagctgcattagatgttgatgttaatatcttagattcaaaggatgaaattgttttaccaccttatgatccaatgggtgctttagctttataattgagtgtaaatagatctttatcttaatctttatataactataactaacataactaacatcaattcgaatcctgtaatactcaaataatgaaacagcgcaattgggaaacttctttttttaacctctcatgaaacaagacaatttaaattgaatttgcttttattgtgtatacattactttttgctattgtgaataagttcttttctctttatttattgtacattattctcatctaatcacattacaatgaatgtattgtggttattgaagatattatcttttcttatattagataataaacttgtcaatgcgtctaattgtacatctaatagatcaaatgatcatgaaaatttcgattatttcatagttgaaacaaaaaattataataataataataataatactgaaattgatatcaaaaatattgaaaatattcataaagattggaaattcgaatattcaattgatttcttaaataatttccatgttttcagtctaccgaaaaatcatcatcatagtcgattgtttgatgaatttagttttgaatcaattgataatataataaatcaaaatgatttaataaataatggtaatttattgaagagagaaaataaagaattaatagaaaatttatataataacaatgtttatggtatacaatcattgaaaaagaggaaacttgaaaaaagattaccagttccaattgattattccaatactaatttatcaattagaagtaaacaagattcaaccgttgatgagttaaataaaattagtgaagaatttgaaattaatgatccattgtttaaagatcaatggcatattttcaatacagctcatttaggtaatgatgttaatgttataccagtttggagaatgaatattacaggtaatggaattgtaactgcattaattgatgatggtttagattatgaaagtgaagatttaaaagataattattgccctgaaggttcatgggattataatgataatagaccaaacccaaaaccaatgttatcaaatgattatcatggtacaagatgtgcagctgaaattgctgcttctaaaggtaataattattgtggtgttggagttgcatttaattcaaaagtttcaggtattagaattttaagtggtgaaattacatctgaacaggaagctcaagcaatgatttacggattggatgttaatgatatttattcatgttcttggggtccaccctgataatggtaaatcaatggatgcacctgataaattaattagatcagcaattttaaaaggtgttcaagatggtagaaatggtaaaggtgcattatacgttttcgcaagtggtaatggtggtacacgtgaagatggttgtaattttgatggttatacaaatagtatttattcattaactgtttctgcaattgacttataaaggtttacatcctcaatattcagaaagttgtacagctgtaatggtttcaactttttcatcaggttctggtgaacatattcatacaactgatattaataatcaatgctcagataatcatggtggtacatcagctgctgcaccattagctgcgggtatttatgcattaattttagaagcaaatccagatttaacttggagagatgtacaatatttaacagttttaagtgcagctgaaattgatccctttgataatacttggcaaaatagtgcaataccaaatcgtaaatattcttcaaaatatggttggggtaaaattgatgcagagaaaatggtttcaatggcacagaatgattggaaattattaaaacctcaatcttggtattatacgcctttcagattcccaaatttaaaattagaaaactgaaattggtagtgttgattgattcatttacaattactgaagaaatcttacaaaaggcaaattttgaaaaaattgaacaaataactgtaactgttaatattaaatcaaataagagaggtaaagttgaaggttgaattaatttcaccaaatggaattatttcaaaattagctcattcaagatctcgtgatagggatacttcaggttttaaaaattggacattttcaacagttgctcattgggatgaaaacgcagttggtgaatggaaaattaaggtttataatgttgaagctgaaaattcaatttcctttgatggttggcaaatgcgtctgtttggtgaatgtataaatcctgaaacttgctaaaagatttgaattaaatgaagattatagtgttattaatgatgaagataatgaagataatgataataatgaaactgaaaccgaagtcaagtacagcatctgaaacttcaacaacatcaattgaatcagtcaaccacaaatacaattgacacgcctacaactgaagtagttgaatcaacatcagcaactggagaaatcactacaactgaaaatgtggagccaactacaactactgaagaatcgacaccaactacatcattaagttcaagtataccaacatctgatgatcaacaaaagggtaatggtaatgatagttatgaaaatcctgataaatcaacacattttattggttatttctttgcattattagttgttggatttggtattctgctatacataatattaacaagaagaaagccaggaagagcacgtcgtagagaagattttgaatttgatattatacgtcctgatgatgatgatagtagatttgaatttgatgatgatgacgatgatgatgatgatgatgaatttaatgtaagcgattttgataacgataataatgatattaattcaaaacctttacaaaattctaagaatgataattttaaattagatccatcatctgaatttgatcttggtagttcaaatttaaaaggtcatgaaacatcagataaaattatcaaagatgttattaatcatgaaactaatacccctaaaagtaaagatgaagattattcaaatgaacgtacgggacttatgaatgataacgataatgatgatgataattcatcattgcacaataataaggataataatcaagatgatgatagactgattctttagtttgatctttatataaacaaacactatatagtatttcaaaaacttaaattttgatagattaaagaccttccctaattctgtatccatgaatttttcactctcacgcattataacgatttttatttcggaatctgtttcttttcttgagccatagacaacgatggtatcaccaactccaaaaccaacaccaccacaaccgagaataaaaaaacaaataaatactaatccaacatcacaaccaaaacttgaaaaagaaactcctaaaattgattcaaaaccaaataatggtaaattatcactttatagtcgttataatgcattaccatttaaattaaaattgtacttatggattacgactgctggtgttgcttggttagcagatagtgttagtgatagaatatttgaacaaaatatgattgaagaggaagctaatagacgtgtagaaatggaaattcgtaaaatgaaagaagctgaaatattacttaatagtaaaaagtaatttttataaataaagtcatcattccttgcatgtaaatactttgtatattataattaaagtttaaaaattcaagatactacttttttttaattaactgattagagattataaatataaataactggaaatacaaataagcagggaaataaaaatcattaaaggcaaagacaagaaaaataaaataaaataataaaatcattaacattaattctttttcaatgaagaaacaaattctaaaaatttagctgggtttgcatcaatacctctagtgtaaacaaattcagatgctaattttgttgcaaatatagcctttaaataagcttcaggaactcttgtcaaaacattttctaaaccaatttcatttaataataattttggtaatgcactctttaaaacattattacggaattcaatatcatctgaccataattcctttgatgatgaaagttcatcacctaatttattaattgcaagtgataattcatcagataaatcagcaaattttttattagtttcatctcttaatttccataacatattaaattcattctctgcatttctaataataattgattggacttccttaacataattttgataaaatgttggtaatgttttagtttttggatccattacacatctttgattgaaattcttcatcacttaatgataatgcagctaaaacctctaatgaagaagatgtaacaccacctttattagttgaagcatcctttaaaacaattgcacctgcatcttctaaaatatattttagcagcttgagtaatgaaaagatttgcaccttcaataataattggaataattgatttaccagttttaggatctaataatgaattaacagttgaaacatcaattgaatttggtctaccaccacatggagtccataagttgataaaatcttttggataaatattttgtaaatttaaatggaattgatttctaaattgaataccattatgaacaatttcaccatttggtaatttaatatctttatcattaactaaaacaatataaccctttggacctaattttgatttatcaaattgattattaccatacctattattagctaatcttaataattcatccttatcaataccatcttcatcaacaatacaaccaaaaccatcaacaataccaatactatttttcatctcctgataatttgatttcatttgaacctaaatcaccatcaccaccacccatttgtaatttcttaacagttgaccaatcattaatatttaattttttataaacaccttcagtaaatgctctaacacttaaagtggtcataccatattcatcatgtggaataccaccaatttcaggagatttaccagtaaagaaagctttccaaggaaaaccaaattttgcacctctctttttagcatgtaaagttgcccaatcaacaaaaccagcagtattttcatcaggacccatgtataacatttcaggtttattatataaatcaacaattttttcctttgaaggatcatttaaaattaataaatctaataatgaatcaatatatttaacaaaacattccttcttttgaatttgagcagaaccactattaattaaaataacaccctttgaaccaccttctggaatatctttatttttcttttgttgagttgaagctaaattataattttcatcaaacattgttctcatattcttcaaatagaaatcatcattatttgataagacaattctaataccacctcttgcaacgtctctaaatctaatatggaaacctctaaattctgaaccaacaacgaaaaacataccaaaaggttgatttggatattctgattctggtaaaaattttgatgcatcaagtctaaatgagatagcaacttttgaagtaatgaaagaaattagttttcaagattgatttattgaaagcatataaaactcttaaaacagtttgataattataattattagcatcatttaaagttgaattgaaatgttcatcattttcaataccattaattttagaagttctttgataagataaagttttgattaaatttgattttgaagtataatgaatatcaacaaaatttttatataattgttgaattaattttaaatttgaattaaaagtttcaatgataaaagtttcagtaaaagtttcagaattgaatctttccttaatcttattaactaacttcgaacagtctttggtgtaacatttgaagaatttaataataattttttcaaagattgatattcaggacctaatctatttaagaaatgagtaatgaaaatgacaccacaatgagcataaatacattcttgaattgaccaaataccagattcgaaatttgaatagaatttattatcagggatacaatataataatgaagcatctttagtaatttgtaatgaagttaaacttgaatctaattcaatatttgaattaatatctaaatacattgaaataattgtataattatttttgaaattttcaacatattttctctttaaattaattttataataatgaggctaaggttgataaagctgaattatatctatgggaagtaccagtcttataaccaataataattcttaattcattagtttcagataaagtataatgtttaacaactggaccttcagttgaattaagcttcatctaaaatttcagaatataaagttttagtatgattagttgcaattttagagaaagttgaatctgagattgaatcaattgaactagatgaatcatcgtcactagttgatgaaaaatctgatttataaacgaaataacattttaaagtttcaccatttgataaaattgaattaaaagattctaatctatatgaagaatttttattatctaagaataaatcatcaatttccttttcaaaaatattagaatcaccagattcaaaataaaccgcatttgaatcatcattaatttttttaaaatgaatatcagttgaaccattaattttagcattaattttagctgaataaagggataaaatatttgaagcaatattatcaattgaatcagatgagaaataagtatcattaatacctaaatcattataaaaagattcaacttcagattcaattaaattttcagggattaaaccaaaagaatctaatttatccataactaaatttttttgatcatcctttgatttaaatggtgaagctatataaccattattagtaatttcatcttttgaaaggttttggaatgaagattcagagaaattgttatccaaagttaaactttgaatagctggaattgcagcagacatttggtcttgattggtatttgaattaataaaagagaaaaggtaaaatagtaattaataagataaaatattaatataataaattgaataaaagatttgaagaggttaaaactaagggggaattgaacagccttttaaagtaaaaccagttaaagtaatgagtaataataattgccaccacaattgtcaaaataatatctgatatattctaattataattataattttaataatgagcctttaatgagccttattgccctagggcaaattgtttaaaatttcatgttaatataatatgtcttacctaatacagtaatagcgcctattattaacttgatttatcccccctattattgtttattgtttaccgctgttaaccgccattagtttaaaatcaaatgacttgtaagcaatttaaacttttatcaattccgattaattattatccaataatctactctcatttatctttaaatttgcaactcgtaccgagtataacctttgatatccctatattgtatgttttttcaaatttattaattcctcatctcgcaataaattagccgctaagtcttggaaagtattcggcattgatctccgtaatattggtctttattgtctttattgtatttattatcgttattatcattattttaattttaattccctcaatgtaaacaatctttccgcaatttaatatcctttaattgacttgccctgataactgctccatatcttgtttatattatttgcatgtgaaaatttgtcagtaacttgaaaaaaaatttggatgacttccccccttcccccccttctctcttgtggattcagagagagtttttgtccatttatacaagtaattaattgtgattaattttaaagtaaaagtaaagctactatactaaaagttttaaataaatgtatttatatttttaatctgttatctatatcatgattaccaatttatttacacattagttagttcatagttatattgattatatatactactaattattaaatgtgtaaaataggtgaagaaagaattaaatctaaatgaaaatgaagaaaggaaaaagaaaagagagaagtaagtggaaagatagaatcaattctgtaatactgagtcatagtcatacagtaaagtaaaaattgattatgtcagcatttcgcgaaatttttaaattttttcaattttttcaattttttcaattttttcaattttcgcgtttcttttctttttcatttttttatttttatttttattttcatttcgatttcaattcctgtacctgaaactgttcacgttagatttttattgatcccagtttcttattgttttttattaatattgtgaatcttcctgtatttactatttattatttattatattactctcattccttcacataaaacaaataatggtaaatctacccacattcaataataacaaatcaaattcaaataatgattcaattcaaaaaacccgtactaataattcactcccttttaatataataataattgcaacaattacaattaatgcaatagcttggattattgcatttgcaggttcaattgctgcctctcaaacaattgatttctttcctaaatttacttggtgggggttagttttcgaattatttatagttattggtttaccagtattatatttcttaaatttattacatcaatatcatcaatttttattatcaattttaacaattgcttttatttatacttcaaattcaactaataatttggtttattatacagattcttcatcatcagctgctggtactggatttatcttattaagtatggtaaatttcttatggttactctacttaggttctgataaacaatctccacctattaaatttattgatagtttcgatgataaatcaactcaaactaattataacaacaataataataataataattataataataaaagagtttcatcattcagaaatacaagaggtaactcttattcttatggggctggtaatcaatcaactgtcaaacttaataataataatgttcatgaattagaaggttttgaaaatcgtgttaattcaaatactttatcagaagatttagaatttaatgattctgcttacagacaaagtggtataataaatttaaatcctccacaaattgatcgttcaaatacaattaatgataatgaaggtactaattttacaggtatttcatcagttactaattatatggaaaattatccaattttagtacgtagtttatatgattataatgcaaatcctgaagatgttaatgagttatcctttaaaaagggtgaagttttcagagttaaaaatactaacggtaattggtggcaagctaaaaataaaaatggtgaaattggtatgtgtccaagtaactatcttgaaattgtcacttaattatctctatctctatctctcatatcattatatacattttgtaagttataataactgcatataatatagaaacagctcttatcttatcacccctcggaaaattcagactttttttgcaaacatgaaaatttatttccttgttcaattttccgagattcccttttttctggcgctgggttataaactattccttataatgtaaacaaacacaaaacactggctcttcctgaggaattcttttaattcccttacttcatcttcccattggcaattttcatcattaaaatgatgaatacggggatttctaaacaactcccgtcttctgcttcaaataattcttctttaactaaggttaattcaaaattttataatgaaaaacatttaaataatcaaaataatgttcaaattaataataatcaaaataacattataattgatgatattaatgaaaatatgatatgtccaccagtattatcaccttatgcattatccgttttagaggataaactaaatatgaaattgaaaaataaaactaaaacaaacttgaataattctaaaataataaaatctgaaagaaataataattcttcaattttaaatgatgtaacatcatcaaaaaccaatactcaaacaaatataacaacttctaaaactcaaatatctagacattcaagctttatgaagaaattaggtctaggtgcaccacgacggttaactgatgatggatttaaaagcttttcaaataaattagaatcaaattcaattgggaatgaaaatgaaaacataaacatagacaccaatccagcaagaattgcaagtaattccccaatgacaatttcaaattcgagagtaccaacaagaacggaaattggtcatgattcaaaagaagagaatgaaaagaaaagattgttgcaatcaaccccaggcgtttattctccaatacataaacgtcatagtataacgttaactgaaaaggcaaatgaaccaatcaaacctaataatataataacaactccgattaaagacaatctttttgaaattgatgttgattcaccagagatgggacgacgttcaatttcagaaaagaaaataactcataatacaactgattttcaatctttatttgaaatcaatcaagataaatttgttttaaacttggatagtgataaattcacaacaaatactaatactaatactaatactaatactaataccaataatagcaaagaaaatgattttaataaaaaaccaacaagttttgatcatgttcaaatactattagataaaaagaaagaaatttatgcattaaggaaagaaattaaacaatataaggaaactattcttaatcaagcaaaggaaaatatagaaagtaaaaagtcattagaattattgaaacaaaatgcacagaatgaaactaaactaatcaattcaaataatccaaatactgaagaaaataaagtaatacaagttaataaacattcatttaagatattagaacaaattggtaaaggtggttcctcaaaagtttatagagcatcatcactggaatcgagtaatagatattttgcaattaaagtagtcaatttagatgatcatgaattatcaacagttgaagaattaaagggtgaaattagaattttgcataaattaagacattgttcaagagttgttagattactggactactcattaactagtaaatttattcattttgttatggaatgtggtgaacttgatttagcaacagttttatcaacaagacattcattcccaaaattttatgattcagaatttgttagatatcatgcaagagaaatgattaaatgtattgatgttatacataaattagatgttgttcatttagatttaaaacctgcgaattttgtttttgtttcaggtgttttaaaattaattgattttggtataagtaactcaattaaaagtcatacagttaatgtttatagagaatttcaaatgggtacaccaaattatatggcacctgagacattgatagatttcgcagaaaatgaagcaggatcgacaatttggaaagttggtagacctgcagatatctggtcattaggttgtatattatatcaattaacttatggaattacaccatatgcaaattacacaggtacaaaaaagattctagctataacaaatccatcaattcgtatatcgtatcccactaatgcggttaacttaagaaagaaaaataaagaaaatgatgaacttaataataataacaataacaataatgaaactaatgatgaagatactgataatgaaaaagtttgtccttatttgattgatatgattaaatcatgtttagtacgagatccaagtaaaagaattacaagtgaagaattactgaatcatatttttgttaaacccgttattattgataaaactgttcttaaagaagttgtaagagggtgtgttggatttggtagtagacatccagaaatgaaagatataaatgtatcaacatcaagtaaatttactccaaataaagagaatttaaaatctcaggagagactcaacaaactaattgatggagtttggaaaagggttagtgaagattgatttcggcgtcaaaagagaatttaaaagtttctccgattgtaatattagaatgatagaattctgtaactttaaataattattaacgaaaataatataccactaaatttacatgtaatctataatcaaaatgattgaactaggatataacgttatacgggtaatttttaataaataagatgtgaaagtagaaaattgtaaaaaaacataaacataaaataaatgtatctaatgataatgataatagaataattataattaattaacgaggacccaatttatctaaaactcttggaccttgttcttcccattcttgtttcgatatccacatatgatctttatctgccataatattagctaaaactgcaccacctataaaaaccatatgctttcttcttggaggatcctcaattctaactttaaatttatctaatctagttggatcaccctttagtactttaacaaaccattgttgttttaattctttctctaatcttgaaggtaaaccaggatacattgatgaaccacctgataaaacaattgatttatataaagttgaccttacatcaacatcacatgattgaattacattaaataatgtttcaccaacacctggttgttcaatatcaactaatgaaggttggaataaacattcaggtgcttcaaatctttcactaccaatttttataactctaccatcaggtaattcaaaattactaactaatgtagttgtctcatttgctaattttgtatcaaaatctaaatcatatgatgcataacataattgttccttaatttgtctaacagtatcaaaatctgctgttctattaaatgcataacctcttcttaataataaattaattaaatttcttgtaacatctctacctgcaacatctaatcttctagtttgatgatttaaaacgactgattcataaactggaacaatatgtgtaacaccatcacctgaatcaacaacaacacctgatgataaaccttgcgcatataatgctaaaactgcttgaattgcaacataaactccaccaaattgatatttttcaaacataacatcacacattgtttccctattcttcaatggattcattggtggttcagttaataaaattttacgaccttgtggatttattttcatacgttcataaaatgcataatcccataaatgttccatatcttcccaatttttaataataccattttccattggatatgaaatttgtaacatacttctaacagctgctgcttcatcaccacacataatatctttaatttcaacatcacccattgctctttcttcagctctcaatattggacgtccaaccattgatgggaatgtatgatctgggaaattagttcccgcccttccaattttaacaaacccagtaccttgatctaacacaattggatccattgctcttacaattgttcttatttacctctaagacaaactttacctaaatttgtaaacttattaatgcatgtacgccttcatctccttcaatctcgcttttctacatgtttttccacaaaaaagggcggtgtggaaatatcaattgcgtctatgcgtctatacatgcaaccttatctactatgcatgtttataagttgtatattatggtttactgtaggatatatgatattattctataaacaacgtatacaggaaagtaataggtgcatttaacctaacattgatctcttacgaccacgtagtctgactgctgcaagtcttctttcaacatctctccaagcattaattttctttttctctgaatataatgaatgataaccttccaataaccattcattatataattcagagaattgtggatgtgtggaaactagtgcacgttcaagaacgtaaatatcaacagctttatcctctactaaatttgaataacttgataatccaaaatcaattaatgcaactgaatatttttcttcagtttctgattctttaactaatacaatatttgaacttgttaaatcaccatgtacaacttcattgagatgtaattcagcgattgcataaccaactaatctcataacatctttagctaattgaccaattgcttcactttcacctttcttttcgataaaccataaccaattttttaaactactaaaatcaccattgggtaagtctgaatcctaaaaattccatccatattataccattaattgcatctaatgctataagttttggtgctttaatattaagtgaatctaatttatataataattttgcttcaccagctgttctactcttagtaatctgtaaatctaattgttcatgtctatatggtttacgcggacgatatttaacaatataattattgacatttgttaaacctgctggtttaatatcttttggtaaatatggatgtttctcagtaacgaaaaactaatgcctctgcaccttgtgaaactaatttcaattcaaaatctggtagtattttctcaactctctctattatctctttcctcatgctatattgttctataaagtgtatataaaggaagtctgtaaaaaataaagttttcattaacagtgtcaaaaattgtcagcatgaatttcaatttccaatcaaaaaaatttatgtcccgaaaaggaaatttttgttaaattaaaaactgagacacgacttttattcatttaccttaaatcaaaacattgacgaatacgcacgttaaataatgtcaactatatccgaaattacgggatctactactcctaactatgattcgcttaatacacctacctctgaaacaccaattcaaaatacaatgcataaattaaccactgataatttaaaactaccatttgaaacaccatatcaagaatacgagaaatttatatcaaatgaagtattaaataaatcaccaataaaggagacgaatgagtcaaatgtaactacctctccgcataccccacaacaacagaaaatggatgaaattaataattttaatgatcctaataaatttttaaaacatatagataatattaaacatttagagaatagacttaattatagatttttagaactggaagcaaaattaagatttttaagattattaacagcaggtactgatatttcatcaagtgatttaacattggttgatattgattctgaacaactacaaaataaacttaattcattattaacacaagttgaagaattaaagaagattggtaaaacattaagaaaaaagattggtaaatgtttccatcaagcagaagttcgacgttgtattgagggtaaacatgtattacaagatgaaattgatatgatgactgaagaaatacgaaattatcaaacatttttccaatctaatggattaaataacaattttaataatgataataataatgatgttattgaatgggctaaaagtttagagagtgagaaaatattaggtggtgaagaatttttagagaataatttattaaaattaagtgaagagattgaagaattgggtaaatcattaacagatattgagaaaacatttagtaatgtaaatgaagaggaagaacaactagatgaagaaattattgaacttgaaagagaaaaggagaggttggagaatcaatataaggaattatcatctcatgaaatgacggaggcggatgttaagctaattaatgaacaaaaggtacttaaacagctggtaagtatctgggagtcattttaaataagttcttccgttgatatcagattaaaaattaggagtagagggatatataatatatgtagcaaaaggataggaaaaaaactttataaatatatgatgtcgtagaaagaagagaaggtaaattattcatttcgacgcattaaaaaagcgcccattgcaccaagataaccttcatgatttaaaaaataagctttcttttcaccatttgaccaaaaatttattgcaaaacttaaagttcgtatagtttgattatgatttcgtatataagaaccagcaaaataaattttctttaaattataacgttgagcttgtaaataagcaatttgtccaatattatatgaaactgcatataataaagaacgagcaatatctttttgattaaatttatttaatctttcaacacgagatagtttagtttcatcatttttatcatttttatcaataacttctttaaatactttacccattgaagaggctatatgatttgattttaaaccaattttatcatatgacataccataaatatcaccaactaataaatcaacattctcattattaccgtttgatgccatttctaacatttcatcaaaactattacaatcggttaaaattgataaaagcccccataatgtaccaccacctaatgatgaacctccaactctttcaaaattaccctcatttggacctgtaactctaatcattgaaacacctgatccaatatttactaataaatatgggtaaactgaagaaattaattgatttgaatcatttgactctattgtttcattaaatgattcattttcacaatcaatttcaacatatttattattaacatcatcataataaaagatttcatttttaataccagtaatgaaaaaatccatacctattattaaacattgcatttcatcctctttttgaattttacaatttaaataagttaattcatttgttaacatattatagtatttatgggatccaccaccggttgcaattaaagttatttgatatttattattatttacctgtattaattccgttattgtctttttaataaattctatgaattgggaaattttatcagtttcaattttataaaaattaattctaacaccattatttaattttgaatcttttgtaaaataaaccattttagctaatgaaccgccaatatcaattgaaatttcatttatatcattaataaaatgatttggtaatgatatatcatttgcatctggtaaattatcaaattcatattcatttaaattattcactatatgagcatttgaaacatttaaaggtttttgattatgacaatgattatgacgataaatactattctgtcgagatgaaacattggatgaaacattggatgaacatttgatgatacatttgatgatattagctgaagatatagttgaattagttgaatttgttaaagttttcaagttattaatactatcgacattatgactatcaatatttggaatgttttcgtttagagacattgaacttaaattcttgtctaaattatgaatatttattaaattttcttcgttattattatttgattgattattaattaaatgagaattttcaatgaattgaatgattaaacgtcatgtattttaattacgagtagatatttatatagctctttgcagtaataaattattatcaaaagtaataatatccaataccgtagatcctaaatcctatgaaatataaaatatgacagtattgagccttttaataatacttttaaatgagccccaccttcaagtgcaatgtgttagtaatccaacgaattatagtgttagactcgttccgacagtgttgagctctcaaattggaaaattgatgggaaaaaaaattatgttgttggtggaaattttactttccccagtgactgcatgggcagaggggaggggggtggagttcaccgggggagtattaacggtccaagtcattttcatctatggagaaagggaaaccacaaggatattgaatgtggcggtgtgttcgctttaagcggatttacggcgcatggcttttacttcttaatgtctttcctacaaattactgaatgaataatagaagatcatatagtatttcatttatctgttcattatatatatcgaaggtaaattagtgtttatacaaggtttaattaccgaaatatttgtcataaccagtcaagacaaatctgaatttaacatcacccttggtcattctttcccaagcagttttaacatttgcttcattaatatctaaagtttcaatcattggtttgatgtcattctttgctgcaacttctaacatatattcaatatcttttggtgaaccaataactgaaccaccaactgaaatgttattcagtaacatttggaatggtgtaagggttaatttatcagtgattggaggtgcagtaataaaaatcatttgaccatatggtgcaagtaaatttaaaactgaatcaactgctgtttcactaaatgatgatgcagtgttaattaataaatcaagtgaatcttcatatttagttgcaaaatcttcttcatcagttgcaatataatgatctgcacctaatgataatgctaattctttctttttatcattacgtgaaattgcagtaacctctgcacctaatgccttagcaaataaaattgccatatgaccaataccaccaataccattgataccaactctagtacccttcttaacaccatatgtcatcattggtctgaatgctgtaataccaccacataataatggtgcaacataatttgaatccattgattctggaattttgaatgcgaattcagaattaacacgaacatgggatgcataaccaccttgtgaaggtttaccagtttctctataagtaccaccataggtaccaaccatttttttacaattattttgattaccgttttcacaacgtttacatgtatgacatgaatcacattgagcaccaacaccaactctgtcaccgaccttgaatctagcatttggacctgtagcagtaactgtaccaacaatttcatgaccaactgctattggtgcaaaaggttcaccccaatcaccattagctctatggatatctgaaccacaaataccacatgcttcaattttaatttcaacatcattatcacgtaaatcttggggttcgtatgtaaattcctttggatttaaccaatccttgtaatcaataacaccaattgctctaaaagtagtagacatctttttattattatttatagttttttttggtaaaaggagggatataattaaggttaaaaatttgtaagtggaatttcgaaggaaaatggtctatttatataagcttaaatttcagtgagataagacggaaataggcggatttactttatatgagatctgatgacgtatataaaaattaaatatcaatcgatggaattaacaaaaactccgatgtgagattaatattttgttaagtcgatgatcatagactattattgaacatttcataatgacgaatttgtttcataataatgatgtgatgtcccgataggaactaaatgatactattattgagcccttcataataaacttccaataatcagcattaaacttatgtatttttaaatggtatttatttttttgataaatgtttaaaagattcaatattgatttcttggcttctattgataatctctacaattctcgatttttgttcatttattttcattattaataatagagatgatggattaaaatctgtagtttctttcacctggaaacttaagtgaatattggtgaaatggtactgtccttgtagatttgagaaaatatttgaatataccgttaatattattaacgttttaacaaagcttcatccatgttgtaattgcctcggtggtcaataatgaaattgatagttaaaaatcaattgttattttcatagtagtttcattaatcattttcgattttgcaacctttaacacttcatttattttttttcagtcaacttctgtatttactataaatttataaaagatactttacatatttttcttcaagataaatgttaaatataataaaacattcagtccgaataaggaaaagaaaaaacacgtaaaatgttggaggaaatacaatggtagcattactgatatttaaagtcccagtaaatgtcttctatcattctcattttcatattgtaatatttcaggtctcttggcataaagataccctatatgatcatcgacaagaaatttaatgaaattattgaggaaaaaaaatgatgatatttgtgacttcggtggacagattaggatattagcagagtattgccatgagtgtcgttgattagattgattgtaacagaaatttgtgaggggtgaatttgccatgatttatgatatgttgatgatttagtcgtcattgagtggaaagttatataaatagctgctgtagaagtgcagtcaaaaaagcttttctaatcttgttcactgtgttgttggccgtgttgaagatgtggtgtgttgaagatgtggtgtggtgaaaattatatgtgttcattcatttttaacttttgaagggaaagattcggtacttcaattgtataagtcaagagagactgttatatggtgattaaagaagataaattcatctgcattgtcatgtcggtgctgagagaagtatcagcgggtggtgtgtaatgccccaataatggtgaattgggttctggttgaggtagcagacctcttgttgatttcgtttatcaaaaagttgttgtctgtgttgctctctgtatatttcacattatctgacaattatttttgatgaatgaatgaaaattaatgttgttgatgggagttgtaacttattggaaaaattattggtcagataataccactgagtaaagtgttgaagatgctgcagattattggcgaaataatatgagttttgaatggtggttgaaaacttttgtaagttttgaagaaaaagtatgctaagtaaataaatttggaaaagtacgtgttaataatttatcctatatagaatagtataaaactttaaaaaaaaccattaattataattttaaaaactaactctcccattaattaccgaaatatttgtcataaccagtcaagacaaatctgaatttaacatcacccttggtcattctttcccaagcagttttaacatttgcttcattaatatctaaagtttcaatcattggtttaatatcattctttgctgcaacttctaacatatattcaatatcttttggtgaaccaataactgaaccaccaactgaaatgttattcagtaacatttggaatggtgtaagagttaatttatcagtgattggaggtgcagtaataaaaatcatttgaccatatggtgcaagtaaatttaaaactgaatcaactgctgtttcactaaatgatgatgcagtgttaattaataaatcaagtgaatcttcatatttagttgcaaaatcttcttcatcagttgcaatataatggtctgcacctaatgataatgctaattccttctttttatcattacgtgaaattgcggtaacttctgcacctaatgccttagcaaataaaattgccatatgaccaataccaccgataccattgataccaactttagtacctttcttaacaccatatgtcatcattggtctgaatgctgtaataccaccacataataatggtgcaacaaaatttgaatccattgattctggaattttgaatgcgaattcagagttaacacgaacatgagatgcataaccaccttgtgaaggtttaccagttgcttcgtatttacccatataagtaccaacttgttttttacaattgttctcattacccttttcacaacgtttacatgacttacaagaatcacattgagcaccaacaccaactctgtcaccgaccttgaatctagcatttggacctgcagcggtaactgtaccaacaatttcatgaccaactgcaagtggagcataaggttcaccccaatcaccattagctgcatgaatatctgaaccacagataccacatgcttcaatcttaatttcaacatcattatcacgtaactcttgtggttcgtaggaaaattcctttggatttaaccaatccttgtaatcaataacaccaattgctctgaatgaagtagacatcttttttactatttgcttgtttatttaaagtaaaagaaagagaaaagaaggagtaattgggaagtgaaaaaaaacaagaaaattagcaagcttaaataagctttttttaacgcttccggtcccacaaaacgtttcggaccgataagtgatgattcaaggagttaaaccttaatttccttttcttccagtggattctcgctaacattgcctcaaagggaagtggaaaagtttatgcgagacattgttgctctgccctgcattaataatcattttaaattaatccgtggagattagttttttttatcatatctcatgtctaatacgttgatataaaaaataatatattagaataataaagaaaaacgtatatataggatataaaaatataatgtatgatagataaataactaaatttaattatataaaactaattgacataacaacaaaaacatttatagtattagaatagtaaaattatattaacttaccattctaatccaccttgttcagcaggatttgaacccatacattcaatacctgcacaaattttttcaagttcttcagcatcagcattttgctttgcagttaatgcagctggattaataattgaaccattttcttgttctaatgcataatgttttttaaccatatctctaactataccttgataatataaaactcctctttcctttaatggatgtaaataacctgtattataaataccattattaagatttttttgagttgcttcacataagttaaaatcttcaagttcaacttgttgtaagaaatcaacaaattctttcttttgttcttcagttgcacctttctttgcataaatatcatattgtaaaattgttctctttgcactaattggtaaaactctaattgaataccaagctggtgaataacaattaataccattagttgggaataaataacaccataatccattaaattgtccaccaggatttgctttcttttggactttttctgttgcttgtttctttttaccaaatccaaaccatgaactttcttgatcaggatctgcattatcttcaataattggaatttcttcttgaacaatttttgcataatgtctacaataattaccctttggaacaactttataagtttccattttaaaggcttgatttaaacctggatgagcagttggacaatgataacattcttgataaccatccattaaagttttccaattaaattgaccatctaattcatatgacatatgatattcataatcatcaaaatcaaattcatccatttcattttctaaacctgcaaaaaattcttcaaatggtgtaaaattttcagtattatcaaaattaacgaaaactaaaccttgtcttgatgtatgtgtcttaatttcatataatgaatttgctgtaggatcaaatccttcaatattttcaaaatgtggtgcctttttcaataaaccatttgtatcatatgaccaaccatgatatttacaacctaaaatagttgatgaaccttgttgctttctaacaactgggaatgctctatgtctacaaatattatgaaatgctttaatttcaccttcctttgttttaataaggaaaaaattccaaccaaggaaattaaatgcaaaataatcacctgctttagtaaatcttgatttatgaagacagaataaccaagattttgcaaaaattgctcttttttcaaaatctaaaactttatcactaacccaccatgaagctggtaatgtatgaacacctggtaataatttatcagattctaaatctggtggtggagctgatggttgtgctgattcaactgctactgacattgctaatatatttttatttgcttttgtttatttgctttgttgaaaaaaaaatatcagaaagtatctaataatctaattcaaagtgactagatgacataccatcagttatttatacaccaagaactcgacacatacttaaaacattatatccaaatagtcagccagatgtcagaaaacaagttaccatatcaggcagtttcttaatattatgctaatcttatctaatcaataatactatcaaatttttcacatcaagcatcacatcacattcaatctccagataacccttatcaatataaaatttaaatttcggagaaagttctttcctaaaagggaattcctgtccactgtgttacgtaatgcaccttaacgtaatattacttactaaaagaagaactactacttgtctagagtaatgaatggctgatgcacttgatgttacactgttagtagttattaatatgtcaatgtcgtcttaactcttttgaatgatgaaaatatagaccatgattaacccatggaagaaaactgtaaaactgtccgattcaattcaactcaatcctcgtaaattatgtattttgtgaaagcattttttttacagtgaagaggggggggtttgaatttaatattattttctagaccatgggaacaattattaatttgatccgtaataagttactatgagttgtagaatcgtccttaaactacacatatcctatattcttatctacaaataattacttagagaataagtacattatttatccatttatttgaaaattaatgtcagaaatacccattttattcagtaaccaactagtacctgaaaagggaacgtttaaaattaaaattgctgtcaaaaatgaacaaactttacaagatttcaaaatacgatcaacacttttacatgatttactaaattcctcaatcatatttgatataagtcaaataactgaaaatgatgaattatggttcaatattagattggtaaatttaccatcaatcaaaaggctgaaacttaaaaatgaaactatcaattttactatttccattcttgattctgataatcaacaaaatattccattctctgtgtctcttttgaatctatttcaactagctacggggcatgtaaatgaaattagtaaatcaatatcaaattatttattagatattaattttacaaattcaattgatgataattatattcatgaattatcattatatttatcaagtttagacaatgttagtaatactttaagtaatgttaaagtagattattcagatgcaagttctattaattctgaaatatctaataattcatcaatattcccagttgatacattacgatcgacacaatctaatacttcattatcatcaatgaagaaaagtacaaaatcattaacaaaatcattattcaaaatgaatagacacaaaaatacagtcttatatcctaattcaaattttagctcaaattcaaattcaaatataaatttgaattcaacatctgagttatcattgaataataattccagttccacttcaaaatcaaatttaagatcgtcatctgcttcaccagttagtcaattacaatcagactcctcattaagtcttaatatatccgatacaaatcctgataaatatcatgatgatactgatggatttttgatattacaaattgaatcagctacaggattaccaccatttagaaatacaactcatttaggttatgatatggatccttttgttgtcgtttcatttagtaaacaaattttcaaaacatctgtttgtagacatgcattaaatccatcttggaaaaatcaattaattaatttaaggattagtaagtattcatttaatttcaaattaaaattatcagtttatgattttgattattttacttataatgatgatatttgttcaggtgttattcaaattgatgatttaattaatgaatcagaaattaattatatgaatttatggacatacaagaaaattccattaatattttcaaatgaatcactaatgaagaaaactagtgttaaattagaggattatcaaccggaattatcaattaggtttaaatatatcaaattagaaactttgtttaaatataattccaaatttaatccaatgaaggaaaaatgtccgaattgtaataaaatagacaaaacaaatagatcagcattacaacatctatctatatgtacaaatgatttaacaccaaaacaatttattcataaacactttattacatccaataatgcatctcgtagatggtatagtaaaatattggcacatatagcatatggtagattaacagttggtggtaataatgcgcatatattagttcaagatagagaaactggattaatattagaagaaaaaatatcagcatttgttaaattaggtattagattattatataaatcagttaaatcagataattcaagtgaaaaaattaaaagaatgttacgtacattatcaattaaacaaggttcaagatatgataaagcagaatcaaagaataaaattgcaggatttgttaaatttcatggattaagttcaacgatgcaagaatgtttaatttcagatattaaaagttataacactttcaatgaatttttcagtagaaaattaaaacctggtgcaagaccaatcgaaggtggtatggataataaaattattgtatcagttgcagattcaagattaattgttttcaataatattaataatgcgaaaaatctgtggattaaaggtaaaggatttacaattggtaaattacttgatagagaaattgattctagtctagattattcagttggtattttccgtttagcaccacaagattatcatagagttcattgtccacttaatggtactgttattaaaattaatcatattcatggatcatattatacagttaatccaatggcgattagatcatcacttgatgttttcggtgataatatacgtacaattataacattacgtacaattgaatatggagatgttgaaattatattagttggagcaatgatggttggtagtattttaattacagctgaattaaataaggaaattaaaaaaggacaagaaattggatattttaaatttggtggatcaacagttatattagttttcaataataatgctaataaagataatgagaagtatcaaaccattgaatgggatggggatttaatttctaattctaataaaaaattagaaaccttagttaaagttggtatgagtgttggacattcaactggagttgaaggttttaaaagaggttttaaaaatgaagttagtgatgttgaaagaagggaagttattcgtagagttacaggtttgggagaaggatatggagttggagttagtatgggagataatattaaggcaaagattggtggtatgattgatgatgttatgagtgttagtggtattaaatcattcaatgaaaagaatggtaataataataatattgatgaattagttaaaaatgattgggaaatcaatgagttaactacattagatggaatcaatgattatgaatttggaaatgaagaagatttagagaataacgttgatattcaactgtttaattctgatgtctatggagaagttgatgatgttcataaagattagctaatatgaaatattgtgtataaaatgtataactccgaactatgacataaattattgtcgcgctttttaagtatcaacttgtcacattgtgatgatgggcaaaaccagtccttggtatttaagttatttgatatacgttactttatttgggagaatactgctattttttatcttgtaactacaacaaaacaaaaatggttaaaattaacaaattaacagatatagactcaattgcaacttcattaggtgaattcattgtaacacaacaaaatgcagttttatcaacaaaggattcattctcagttgcagttagtggaggttcaatggttaatatactagcaaaggcattattagaaaataaatcaattgattggagtaaatgggttatatttttcagtgatgaaagattagttccattagatgatgaagattcaaattatggtgcattcaataaaactttattagaaccattagctcataaaggtacaattgggccaaaagttgtaacaattgatgaatcattattacatttaacagatactgcaaatgatagtaaaattgctgaaatttatgcagatgaaattccaaaagatggaattgatttagttttattaggttgtggacctgatggtcatacatgttcattattcccaaatcattcattattaaatgaagataaattaaatgttgcatcattaaatgattcaccaaaacctccaccaagaagaatcactttaacattaccatatttaaaaaaatgtggtacaattgcatttgttgcaactggttcaagtaaaaaggaagttttaaaagatatatttgctgatgatagctcattaccatgtgcattagttaataaattaccagttcatggaggtgtatgttggtttgttgatgaaagtgcaatggattagagtattaataaaggtggctcgttgatttaaaatttattaattttccgagattccaaatggaaattttgaaaattgcgaggagaaaaaattttagaattttttaattttatatacaccgtgggaaatttttttaaaaaaaataagattctctattttttagttttacgtaagcaaaaattgccttttttcatgaacaaatgcgctatgtaattttagtaaagaaactcactttaattttttgaaaagtaaacaaaaaaaaagtgattttcaaatttcgagaatgagttttttcatgcgccgcatttacaaaatttttaatgcgccataaattccaaaaaaattgcggatttaaaaacgacgcgaaagataaaaaaattcggagataaaaaaaataaaaaaataaataattcggagataaagaaaaaaataaaaaaataaaaaattcggaaataaagaaaaaaataaagaataagaaaatcggaaataaagaaaaaaataaaaaataagaaattaaataattaaaaataaagaattacaatagaagataaagaattacaatagaagataaagaattacataaagaattacaatagaagataagaaattgaaatgaaagataaagaaaaatacaataaaagataagaaattgaaatgaaagataaagaaaaatacaataaaagataagaaattgaaatgaaagataaagaaaaatacaataaaagataagaaattgaaatgaaagataagagattacagtatttgtaaataatttaacaatctaaaacaaagggaaaagaaagggatagagtcaaaatttctgcttttgtaaaaaaattaggggaattgaacagatatttataacaaatcggttttttaacatccaaaaaaatttaagcgccggaagcttgtcaattttgaatccgattggctgaaaataatatttgtttgcgtcaaaacacaaaagggtttgaggttttttcaaagatcacgtgattatgagggtttaccctttcttaaaaaggaaaatttcctaaaagagtttagtaattacaatttggcctatttgactgtatgattatttcagttttaataaccttttttcgatttaaattaatctattattttttcaatttatctttactaatttacagtattctttatatcgaattttattaacagtaattacttataacttttttttttcttactatagtaacaatattatacaattttttaattgaattacaaccgcttatcataaaaagaaagtattttatctaactttaaaattgtgtttgaggtgtttaaccatagtttgattttaaagcatcataacgaattaatttctgaagctaagttacgcaaaaatattgaattgtttctgctattattatcatgtatctgtagtccttccaaactcgaatcagcccaattaaaaagggttgaaatttgattcgtttcagttgtattttctaaattgccatcatcttgtgtaacatcttcggaatctaaatacatactagggtcaacgttgtgtatatcttcaatatcaattgttgtgaattctttgtattcatctaaaatcgtttgaattactaatttgacaagtatttttggtaagcaatagcatctacctgatctcagtaactctctgtaaacttttctttttctcttaatagtagggaaaaattcatatttgagcaataatgatactgtcatacatagcatataataaaatttagaattacttatacgtttgaatacactattcagcaactttcctgtgaaaatcttgttgttagaaaagataaagtggtatgaagaatgagatggtatccataatcttaattcgatgttagtattggtggtttctaattcaacaaacaatagatgtacttacggttgctccatttctgtctttgaaaagaaaaggttagaaatagtaaagagttatagaataaattattaaaaacaacaacatgcttgaattgtaaaaataaatgttacgtaagaattaaaaacttgacagattatttaacgttgacacacactgttggacaactttattaacttgcatgttcaatagtaaggcctgcaaagtatataatttaacgactatttaaattacaaagatcattaattacacaacatattcaacacattacattattactcggcagcaaatctgaaaacgtttctgaaatctggatgtttatcagcaataatattgtcatactcttcaaaaacatgaataccaaacagttcaacactattgttcagctccatccattcaaaatcaagatcggaatctctcattctagaatataatgcaaattctaaattcccagaataagttttcatccaatcatgttcaatattcacttttttgaacttcataagtaacttataacgatcatgaagttcaactttaacaagcctttcaacttttacatattgccaattgttatccaccctgaattttgcataaccagttacacctttattactaatatgagtattacgggaatggatatgtttttgttctctgattatcaaactttctccttctgttatttcaccttgagcatacaatcttgaaagagcaccttccatgtcagcatcgggttgagcttttgctgtttttgatgtcgaataacaactcatatggtcatacttatattcagttatgtttttgcaattgtcaatggttaaaaaagtcaactgattttgtgtagttttataactatttttatgagggctcacccttctcctaattgtgcaacaacatctttctgtatgaaaacaccaattatccctaaaagacccaaactctttccacaagtcgaataaatgaaggatttgatgagaaggtacatgaaaatatttttcgaagatcggtttatattcaggaatttgaaataatctttctaatttcaaagtcaatttcaaaaaacttcttctcatctcattcctattattattatcaacaaattcaattggaacatcagtggcaatcaaagcaacagcatatgcattcatttcaatcatacatttaaccaaaaattgataaggagttaacggattcacatttttaatgtcttcagcaatcggtaagaaatataacggaaaaatatgtgtaaaagctttaacatcaatcgctttaactctactcttggtcataagtgaatctaaacaaaggggtatatccctaatctcttcaaatagatgaacttttaccaaatattcatctaggttttttttatgttgaagaattaaattatgtgatgctatatccagacgtttaaaaaccattgaaacaaaaatgctcaccactcttttagtaatgtaattctcataaatagtatgcatcaaatctggacaaacaattttgaaataatcatcaagattaagttgtgaaactaaagattttgcctttactctccaatctgttgtaacatttccagccaaagtttcttccaaacatgatttatacatttcagttgtaacttttatatctttaaagacattttcagcatcatccacatctatttcttcaatttcgtcaaaaaaagtgtatgtaacatcgttattttcattgttagtattaccatcattaccattattactaccttcttcttcaagtctgttacgacgcatttctttagtcaaaggtgtaagaaaaatttgtttttctgatttatgaattgtgcaaaaagaacatggatgatttgatctaggaggtaatgtttccaatacattattcaatgccttcatatcagcagacatcgataataaatttatttttatagtaatttcctgaccattttcaataaaactaaaacctttttctgaaagaagatttaattcttcggagagagccttgcaagtaataccagtatatccaggtgaatcactttttgttaataaaacttctggcatatgaataaaattatttttatatcttaacatttctggcaaatccataaacatgacacaaaaaactttgattcctttataagtcttcacttgaatattacaatcatcactcgaaacatggatgttaaaagtaaactcatttggattgttactgcttacttcaaaaaacctacgcattttatcagattgataaacagtaccaattgcattagtattcctagaatatttctctctctcatcttccatatgttttctgatatctttattttggtaaagcgaataaagaacaggaacgattgactgatatctaaatgattctgcatcacatcttttatgaacttcgttcccaagagtatgctcttgaaggtctttattttcaaaaaaatagagacacagtgaacagtgacaaaattcaatatccttacatgtacctactttgctccattctttcaaaactctttcattgagacgtcttatttctaaatctttagggtgaattaaaccaaaagaatgcatgaatctcaaaataatgttagctttattcatagaaatgtagtgatgagaagacatccaataaacaagaaaagcacaatcagtatgaaagattctcttgaaattatttgccatgaacgcatcaaattgttctgcattgaaatgtggtttttgatattcccaagaattctcatctactggctcctgttctataatatttggatcattttctgttggaacatcttgattaggtcccccctcatcgtcactactgtttccaaaataatcagattcattagaaccacccatattatcaggcattaaatctgaagcatcactaaaaaaaccattattattatcatcatcatcatcattatcaccttcgttaccactatcttcagaagaacttgaatttccggagttaaacccatttgaaggtaacacattattaacctgagtatcaatttgattatcaatataagcatcaaaaattggtaattcatctacggacattaaaacaggagcatcagaatgaatattactagcattagcatcgttggtaatagagaattcacctacaggaggagattcataagcatcagaaagaacattatcatcatcaatattattggaaattgaaagattatctaccgacatttcagatgaagtattttcagaggtagcaccctcaaaatcatcattagttaaaacgtaatcagattcgtatctgtcacaattgtttatttcaataaatggtgaatctattataccattgtaatcccagcctttttcattaaaaaaacggttaaaaatgtcattcaatgtatctgcaatatcttgatctctcttcgtatttaacttcatgaaattaaatgatgattctttaattttttccaaatcatcaaatttaagtcttcttcttgcagcagctttaagtgtggttaaaaacccaagattcaaaccgtatagatttaagagtcccagtaaagaacctctattggttagttttgcatttttgaattttttaaaaatgtactttgcttttcttttattaacttttctagacccatatttattctcaagagtctcaatatcatcattgatattattttgaataaaattatcaatatcggcattaaattgaacatcactagacttctcttgccctgatctctcgttatagtaataattaaaattcaaagttgtacctgctgcaaaacgctttaaccttttttcactcaaaggttcccttttgtgttcctgataagatttgataattttgtaaagaatattttgcacgtttttaatagtgaaagaagatacagatgttatgtctgtttccagtattgatggtactttttccctcaaaaaagagagaaatagaagtgtatcgtctgtgtaactcattagagttgctatgactcaactataatattttagtagttcaagaaaaacgtgaaataaacaagccagataactttgcattctttacaaatttataattaatacgccaaaatgcagtattacttttaattaacacgcgtaaaacatgtttttgcttacataatctttacaatctccaaaaaacttgacttaacgccgcaaaatttggtgttcattacgtaataacattgacaactcactcacagcactctggatattacgtaataaagcatcaagattacgtaataaaattcaaaatttggagttagatgattggttagaatctcctagtttcagggagcccaaatataccggtgagacccttcaaaacttacacattgtcgaaatacaaagggaaacatacgatttttagccccaaaatcgaacaaatttgaattataatggttacagccgcaccaaaatgcgggttttgaaaattttactatgtaaaaaagttacaaaatttcccacggtgtatattattattgatactttaaccattataataaaatatcttttgtattattatttatttttatataagacaatttgtaattaatataacaatggcacaaggtaatttaaaattagctaaaaagaagacacatcgtgtaacgaaacatcaaaaaaatcctaaagctgcagcaccaaaaatttataaagttaaaaatgttaccgcaaaggagaaacaagttcataaattagcaaaacaacatcaagcaaaacttgttggtaatacagaaaaattgattagtagtcgtgtgggtcatttagaaatgttaaaaggtgatcgtaggtcattagaaagagatgagagattgaagcaagaaaaagcaaagaaataaaaattgtctctctctttagatttagttgtgtaacctattataatttaacatatatattaaccatataaaccattttgatttgacttgaactaacttatgcatatatcaactattgttcaaatttagaggaaacatctttaataatctctttacgtagttcatcatgaagtgattttgaagaattgaaaaatgtcttttgtaaagtatttggcacaccatcatttttctctcttttcatctgtctctctctttggatagataatggaacttctggtccttttgtcatagtatatattgattgatataattgtcttatatgataagaagaagttcgttctactgtataacttagacagtaatttcgcgacatgaaatttgtagcacagtataggaaatggaaaaaatggctgcatcacattattttactataatgaatggtagagagttctttatcattaattcatctttctttaacttgtttcctttcttcatcagagcaatgagacttttagcaattgcagggttattgagtaccgttttaggtgatggttcagtattcaactttgtcaatgttggtcaatcacttgatatctcaacgcgagaagctacattaaatttagcaaatagttttggtatggcaaatgaatatgaaattgattcaaatattaatttaaataatatcatttttgataattctaatgtaattgttgttgttaaaggtgttgaagaaccaaaagaatttttctctaaatatgcaatttcaccagaatataatttcccaactggaaatagtgtaaaacaattattaaagaaaattccaagagatgaagataaattaagattaacaaataatattattatttctcaatcaatggagtatttacaaaaaatatggaaggataaagttgtaggtgttgaaagtgatttagctcaattggcttatttccttgaaaatgagaaaattaatgataaagttattgcatttatggaaccatctgattcacttgtaaaattacttgcagaaaatggtaaagctacagttgttgttttatcagataattatgaaaatactattaattttaataaaagagaattaaatccatcatcaaatgcagtttttacatcatcaactccaggttgttatgcaaatcaattagcatgtattgaagaaactgattcatgttcaggacatggtatttgtacattatcaggttcaggatcatcatgttatagatgtttatgttcatcaactgaagaaaatgatagaacaacttattggactggtaattcatgtgaaaaagttgattattcaggtccatttcatcttatcttttggacaagtattatagttatacttcttggtgtttcaggtattaaattgttatcaagttgtggatcagaggaactacctggtgttttacaagctgcaacaatgcaaactaagaaaaatgtataatttagtaacaatcaatcaaatatataatatttaaactaaattaatcaatttaataagttatttacaatatttaataaaagaatgtatgaacccaccggcccttgcaattgtcattacatggacaaaagcaatgagcactaagacgattcgggataatcagtcccctcactctcgccagatgcatgacgccccaatccgtacagatgtcattatctacaagtagaaaaggtgacacagtcagggcaacacgtaaagcattggcttgccgcacgattatcctataagagaacatcatgaatgtaatacaaagacatgtacaagtgggatctcacctttcttttatacacgcgattttactttttacctctcttttaagtcctctttgagggttattcttcaatataagggggatgttttacttataggacaagatggatgtagtggtaaggtatgcatctggactgcctgatacaacagttcatgtagatgaagatgtttctgttcctcatgttttaagaaatgaaataagatctcaatatcctgatttatctcatagaaggttaaaattactttataatggtaggttattatcgactgatacaactattaaaaatttaaaatctccatgttatgttcattgtataattggtgatttactgtcagatgaagaaattgcacaagaaaatgatactcaacctcaaagacaaacaacaactgttcatggttttgatagattaactggattttcacaaaatgatattgctcaattacgtcaacaatttcatcaaatttatggtgaaaatgcaaatactgaaatggaagatgaatggattgattcagttgttggtccaaatggtgcaaatacagctccaattgctaataataatattaattcaactaataatccagaatctccattattaatgttactggcagtatctgttggatttgctcttggaggtttggctcttttattaatactgattgatgcaggtgggatctttggtaagagaactaagatagctgttattagtggtataattgtcaatatatcgtttgctatattgaaatctggtgtataatatgaagtgtttacgtaatttaaggttgtgtttcttttttctgaatgtttaatgtttaagtttcctctgttctttgatctttgttctttgttctttgtttgtataatatatatatcttatagtagatcggtttaatcatgtttggttggggtaagaaacctgcaaagaaagaatggaaagttaatgagaaggatccattagttactaaagttatagatgaaccaccgaaagatcgtcacgatagttatgaagatatagctcatgataatcatcaagaagtctatgataaagttgttaaacattttcaaaatactaaactttatcctattgcagaaggtgattgcccaaaggaaaaatatcttcctttaaatgatcacgaaaaattatggctttctaaacaatgtttccttagatatttacgtgcatgtaattggaatgaatcagataccattaaaagaattacaaattccattgcatggcgtagagaatttggtattgcaggtggtgaatttgataaagttacagctgatttagttgccgttgaaaatgaaactggtaaacatcaaattttcggttttgataattcaaatagaccttgtctgatgctttatactggtagacaaaatactaaagcatctgatagacaaattcaattgttgatttatatgattgaaagatgtattgaatttatgcctcaaggtcaagataaattgtgtttatgtgttgattttaaaaaatatcctgaagcttcaatttatgatccaattgttcctcctgttagtattggtaaatctattctttacatattgcaatatcattatcctgaacgtttaggtggtgcattatttattaatataccttcattagttaatatatttttgaaaatttgttggccattcgttgatccatatacaaagcaaaaatgtaaatttgatgaaccatttaagaattttattgatttaaatcaattacctgttaattatggtggtgaagttaattatgaatatgttcatgatgattactgggaagattttattgccaaatcagaaatcaaacgtaaacaaatgttagaaaactataacaaattaggttcacaaatcggtttatgtgaatgggaattaagaaatggaatatagctttataatttataccttttaaaacttactttattttactttattttatttatttgtacatataatatattaatataatataaatttctctctttattttagatctatctaacaacctattttctcattaaaatgtataaagtttcttgttttaaagctcctaaatttctataattaccttctaaacacattaacaatccaccaaatgaacaataaactgaaattttattatctttaccttcttcaaatttataaactgtaccatgcataacataatcataatcatccattaaagatctttgatttgatttaagtggtctccaggaaccatttgcacctgtaagttcatcaccttccatattagaatcttctccgtctaataaaagagattttgcaagtgtaattgtaagtgtatcattttctgaaacggggaataattcatgatttatatctaaagtaattttagtttcttgtgatgatgttgaattagcaattattctactcacacgatcgtaccttgctgcatcaatactttcaacgttaaatatatcatcaaataatgtagaggacatgttttattattagtttattattataagattgatctatagtctcttaaaaagatcaaattaacttttgaatttatataagtgaagtaatttgaaaatagcaaaaaatcatgatgaaagaaaatttaaaaaaatttaaaattttgcaaactaagaaagtcgcgtctacaccggtttacgccattttaatctgtttcatgtttctatcagattatcactaacttgattatggcattaagatcaacacatgtgcatactctttcattttattactaagacttatatctatcaatggctcgttcaaaatccaattctgttaaactggataatgtcaatgttcattcagaggaatcattacctgaatttcaaatagatgatgaaacaacagatggatttaatatcgatgaagatgatgatgatattgatgatttagaactaggtaatcaacatcttgaatattaccccgatgcacatcgtcgtggacataccttattgggagataatgaagattttaaatataaacttcgtcgtatgtacagaaatattcaaaaagaattaagtacaaaaaattcaaagaaattattagttggtttgggtatttttgtaattgcaattttattctttgcaattatgtttttcactggtaacggatctgatgcaaaacttccaggtggtgcaattcatgatcctaatgttaatcatcaatttgatgatgttggtgatggcaaagttcaaatgcctaataataataatgctcaaaatgataataatgatcaaacagatactgataccgataatggtaataatgatcaagatcaaacaacacctcaattagctaaaatgagcttagatgatatgagaaagggtaattattgggtttttgattatcaactgaatttcattgattttgatgaaggtgttgacgaatctgttgaaactgttaaaagagatcacgatgatgatcacgatgatgatgatgatgatgatgatcacgacgacgacgacgacgacgacgacgacgacgacgacgatgacgatgatgatgatgacgatgacgatgatgaacatgaaaataaaaagaaaggtggtaagaaggaccatgatgatgataaagatcatgataaagatcatgttgacaaaggaaaaagtaaagaatctaattctgttgagacccaaaacaatgagccagagcaaaagcaaagtacaaatactgataaaggtttctacttacataatgttggttctgagttatggctcagacaaggggcagatcctgaattcaacagaaagataattgatctaaatagtctaacttataacggagtcgctttaaatccaacattaatatcagtcactaaatcattagataagattattgtttattcagattctgttaaacaatggagacactcatcttatgctaaatactggcttgttgatgttaaatcattaagtgttgaaccagtttattacttatctaaaaaagataatggagttgaaactataatgcctgtgtcattaagctatgcagctttcacacctgataataactacatttatttcaattacgaaaataatttaatgttaagagatttgaaaactggtaaatttactaaagttactaaggatggatctctaaataaagtttccaatggtaaaccagattgggtatatgaagaagaagttttgggaagtgatagagcaatttattgggatactgaaggttctaaatttgcatttattcaatgggacgatgatgatgttccagtttataatttagaaattttcggtaatgatgagtatccaaagattgaaaaattaagatacccaaaaccaggtttcaaaaatcctaaagtatcattatatgtttacaatattgaaaaatctaaattaattaaagttaaacaaccagaacaagataaatcaaatgaaaccgttgaatcattaggtgatgattttattatttatcaaactgtctggttaaatgataatgaattattatttaagagaacagatagaactagtagaaaaattcaagtttgtgtttttaacttaaatgaaggtaaaacaactattgtaagatccattaatactgataaatataatggttggtataaaaacaatggtgatatatttgtacttccaaataacaatggttatattgatactgttgtttatgagaatcatgatcatttatcacatttcaagacttcaatggattccgagggtgatctattaacaggtggagaatgggatgtcattggtggtgtttcaggattcgatgaatctgataattcaatctattttattggtacggctggtaatgcattacaaagacaagtttataaagttggattaaatgattcatcattagttggtttaacaaaattaagtgatatccattcttattcattaaaagtttctagaggtggaaaatatgcagtaatgaagtatgcaggtccgggattaccaaccgaaaaaatagttgaattaagtaaattatctgaaggtccacaatattatgaaaatttggagaatttaaataatgcaaatagtgttgcaacaatgttagaaaactatagtataccaagtaaagaatataaatcatttacattacatgatggtgttaaagtcaatgttgttgaaatcaagccagctaattttgatgaaaccaaaagttatccattattagtaagtgtttatggtggacctggaattcaaaaagttagttgtgatttcaattatggatttgaagaaattgttgcatcatcattagatgcggttgttttatatattgatccaagaggtacaggtggacttggatgggattatagatcatatgcgagaaataaaattggatattgggaaccaagagatattactgaaacaactgaaatgtatgcaaatgataatgaatttattgatataagtaaaattggtgtttggggttggtcatatggtggatttacaacattgaaaacattagaatatgatcaaggacgagtatttaaatatggtatggcagttgcacctgtcactaattggaaattatatgattcaatttatactgaaagatatttaggtaatccagaaattgaagaaagttatcaagatgctaaaattgaaaatattaagagttttgaaaaattagatagatttttaattatgcatggtacagccgatgataatgttcattatcaaaataccttacaattgttaaatcaatttgatattaatggtattgagaattatgatgtgcatgttttcactgattccgatcactctattgcacatgataatgctaatactattgtttatgataaattattcagttggattgctgaagcatttggtaaataatttaaatcatataaaatataaaattctgtatatttacattaaaggaaagactttttcattaaatcatgaaagaaatgttatttttctgtataaaatcgttagtaaaagtgttcatagtataaaattgagacctcatttttgaggtcttgaatggttaacggtaccacaatgtttacaagttcttaaatctaaatctgcatcaaatttttcaattgcagatttaacttgagttcctaaatcatgacaatgaaaagcttcttcatgacaaacttctccacaacttttacaataccatctcattttatctaacattgattctggtctatcctgttctagcacaacacctacagtattagcaaatctaacaggactatgaggggtattggcaggtaaaaggaaagattcaccttccttgattgggatatcttgaaattttccatcattaacaactttcaaaagcatctcacctttaaattgataaaaccattcaggagtttgattaatatgataatcagttctttcatttggtccaccaacaatcattactgtaaaaccaccagtttgtaaacaataattattaacaggtggttttaatctatcaccattttctgcgatccatttttgaatatttatcggagcacctaatggaaccttagtatttaaagatacatgaaatgatcttttaagtatagaagatctactaatacttaaagttctcaaactacctaatcccctgtataacataatgtcttgataaattgctattgatacaataaaatagtcttatatctaaagaaccagatgaaataaatcgtttaaaaactggcataattaaacgttaaaacttaaaatgatgtgattatactagtagataataataataataataattacgtaatgctttgtttacatgtaaagttctgtccatgagtttctctatataacgtatttccattcggttgtctcacttgaaaaaaacgctagcaaaaaaaccaactcttgcatgccgcgttttgtatgggagcgctaacaaaaactgcgaaaacggccaactacgacagatgcaattttttctggatctgcaaaacctgcactttgaacgcacttaatcatacaacgcgatttccaactggttttttttcactttccaccaagtgagtttctctattaaaattttaaaaagtagacctttaatgtaaacaaagcaaatgttttcagtcgcgtcgttttgcttttttaggacgtttgtttacattttaggaagggggctcaacactgacgtgagtttcactattattactatgaaatatcaattttattattaagaagaatacgttagactaaacaaagtaaaaaaacaaaaaaatttataatatacagacaactttacctgatgcttttgaggtactcactctatgcaatgcaagatcatattgttcccatccacggaatatactatcaattggtgtatctaattcatctctttcccacatcttatgtaaaacatctttaaatgttatatcatatgataatttaaatgtataaattggaaattcaaaaacacctaatttatttaataaccaatatttcattgatatgtaagttggtaaaattaatgataataatttggttgaaaataaattcattgaattaactccatatattcttgtaaatgaaccattctcattgggtttcttaagaatcatattcaaatatttgtaataagaatcatttctcacacaatctaaaatcatatcaaatttaccattatttttaacaaattccaaaacttcattgatattctttaaatcaccctctgtataatcaattaaaacatctgcaccatttttttcaagtctttgctctgatcttaatgcacatgttacaacaattttattggctttcatatatttcttagcaatttcaactgcatatgatccaaccgatgtacctgctccaataatcaaaatattcttaccctttaatgcaccttctaaatcttgattactctttttaccctttaataatcctaacttcaatgcaccataacctgtagcagctacacatgataatgatgctgcttgttcataaatcataccctttggtattttatcacagaaaatacttttctttggattaacaacaatatattgtgaaaatgtacctttaattgataacggatttaaaatatatccaaatactgaatctcctgattcataacctgattcgtcacctgctttgacaacaataccagaataatcaccacagaaaactttagtttttgcaccaatgaaaaatatacttaatctatgaagtaaaatatcaattggattaattgaaactgctttaactcgtagaagaatttcatttgatttaatattaactggaattggtatattagaaactgacaaattccaaaaacttgtataagtaagtgccttactgaatataattccatttgaaattgatttttcgtattcattgaaaatatctttatcactcaacatgtttatattttattgattctaataataacaatggttaaaaccaaataactattaaaacatcaaaggagcataataataaaatataaaacaaatcagtcagttaaaaaacaatatggctcttgctaccttttttaaacttctacttaataacctctcaaacaatgcatgtcattgccatttaacatcattaactgaaaaatcatgcaatttattttcatggagaaataaacttttgacgtattacgtaatttttttcagaggaacatgaatatttttgaaattgatcaaatcacaatcttctcaaaacttcattaactgatctttataaaataatcagccaatcatgagtatacgaccaacaataattaatgtgggtaagaagaaaatgtatatggtttctccattacgatgtttgtattcggaaaatggattaactgttgaaaaattaaaggaaatttgtccaaatgataaaaaatcatcgattttaacaatttatagaaatatcatgagaaatgtaaggtttttacagatacacacattttataagaaaacttttaaatcactattgaaggttaaattaagacaagattattcatatagaagaaatataatattaagtacaagtttaccctcattaactgataatgaaatttatgaaagattgattaatactttaaattttatacataatgcaacattagatgacccggaaacgaataaaactgcacgtccaataagtatggaatataagatattaaaatcaatattacaatatgaaatttctaagaatttaccaaataatataaagaataatttaaaatctgaatttttaacaattgatgatttcgataaattaagaaaatcagagagagcattttatatgaataatgatattgcaagttataattcaatatggatgcaaggaaatagtggattattcaaaaatgaaatatgttttgattatttaaaggaacttcaaaatactgagttttctacatttgtagagaaaatggtttacgccaatttacattttgaaaaagttgtaataaaaatgaatgaagatgcattattacttctttgaagtaaatttatagtttaataaaaagttgtttagtataaagggtagttatagaattgaaatcgattggagggaaacaaaaaaagtatttaaaaatctaacaaaaagaattgaaaaaaatgagcataataatagcaactattgtcacaaaacaaaactaataaaattgtaatttgtaaaactgtaataacgaaagtgtaagtccatactaaaaatcaatatgacataaaatttgtttatttatttttctaaatttaccaacctaatgaacttttaacattgattggagcagaaatttcaggaatatgtcttggtgtatcatctcttgttttaataacattgaaaatcattgagagtggattacttgacttagtattatatttagcatcttgagattcagaatcacttaatctaacatcaccaacagaatttgtatattctaatttcatttgatatttttcttcatcataaaattcagaactatcactaaatgatgaagtatcttcgttattttgaacatctgtatttgatgatttcttgaatcttctctttaataaataaataattgcaccgatataaataccaacaccagcaacacaaccgataacaataccaataatatattttttatcttttcttttaacagttgggattgttgatgctcttaatgcatgagaatccattgaacctaatgattggaaaatatcatcttgactttcactgtttcctgaacttgattgtgaattacttgatgaaaatgctgctctattcaatgagtcaattaatccatcaattggaattttcggatcaatcaatgacgataatgtattgacagcagaattattactattgaaaatatcagatgatgaatctaaaacatagttttgtaaatcagcaatttttttagtatcaaaataaacttctgcaactgtaatcatataatcaacttcaattgatgaatatggaactaatttattaacaataacatccttagcattaacatcagggaatgcaccggacaaaacaattggtaaatattcaaaaatttgggcagatgataatgaattttgaacaataaaggcataatttaatggtttcttgaatccaattgaaataagtttataatctggaaaaacactaactgatgctgttggaataattgccttaggtaataatgtagtagttgcagttacagttgctgtattttgagttgtaacatctgtagtagctgaactttcagcaataataaaagttggaagccaagattctgtaactctaattatattacttgaagaagttgatgtatcggaattgttcgttacagttggtgttgcaataactttagttgttgggacatggacagtattgtttggcgttgttgatgtgtttgctgcaactgatgcatcggattggcctgttggaacaacatcaggaccaatagtagaataaatgagtgtattacctgaaacatatgaagtagttgaatcgattggcgtggtatcgatagtattttgtggggtatctaattgagtacttgatacaatagtttgacttggtgatgaaacaaaggtttcagattcggtagattcagtaatgtgagttgtagtggttgcagcagttgcttcagttgattcggttgattcagtagcagaagttgcttcagttactgaatatgattgagtaacttcggatggttctgatgaaattgttggtgcaactgttgataaagcagaagttgcttcagttactgaatatgattgagtaacttcggatggttctgatgaaattgttggtgcaactgttgataaagcagaagtttcagtagttgattcatataaaccagatgttgattcaataacaggtgtagttgtaacttctggaatttgggtagaaacagacggtgcaattggtagagttgttaaatcagaagataattgaggaatggttgaggcttcagtagcaaatgttgccgttgtgtctaaagttggtaatgatgtagttataccatcagttggtgcagcagatgtaagaggtaaagatgtagtgatatctgaaattggagcaattgtggtatcaggtaatgctgtgctgaatgttggaacaattgtggaaatatcaggtattggtgtagttgaagaagtataaatatcaggtattggtgtagttgaagtataaatatcaggtattggtgtagttgaagaagtataaatatcattagttgaggtatttggaattggtgctaaagttgttgtatcaggtgtatcagtagttgtatctgatggggttagtacagcaccggaggtaacagtaggatttggaagagaagttgtaggttgaattggtgtgtttgtagtgggtgctgcgtcggtagtggtaactggtgaggaagttgcagtatctggtacatcagcagttgaatctgtagttgaagtaggtgatgtatcagtatttgtagttgaagtgggtaaagtatcagtacttgtagtcgtatcaggatcatctgttgaagtatttaatgacaaagcaataggtgttcgagatggtccataaactaaacgtgaagatgttgttaaagagtttgaggtgacatcagctaatgttgaagtatcgctagatgttgttgtgggagtagtagtatcaatagaagtagatattaaatctgtagtagttgaagtatctgaaggaggtaatgaaagtaagaaatttgttggaacaatagttgaatctgcagatgttgttgatgtagcatcagtagtatctgtagttgagataggcgtagcatcggttgtatcagtagttgagataggtgtagcatcagtagcatcagtagtatcagtatttgcggtagttgtagcatcagtagtatcagtatttgcggtaggtgtagcatcagtagtatcagtatttgcggtaggtgtagcatcagtagcatcagtagtatcagtatttgcggtagttgtagcatcagtagtatcagtatttgcggtagttgtagctgttgtgtcaccaaaagctgaaccaaaatcataactaatagtattaaaatctactgaagaaacagatgtaacaggatcttctggtgttgttgtaggagtattaaaactatattgaatagtattaaaatcaacaggagcagtattaacttgtgaacttgttactatagaatcatctgaaaatgctgatgtggttgtaggaagtgaagcggtagttgaaacaggtaatgagaatggtgatgatgtttcagatgatgttgttggagtttcaatatttgatgtagtatctaatgaagtttctactgtaggttcatttgaagttgtggtaggtattggaggtaaaactgtttgagctgttgagcttggaatctcatctgattgttcagttgtcgttggtatcaatgtaggttgctgttcttctgttgtagattgagatgtggtaaaatatgcttcttgtgttattgatatagatgatgtagatgatgatgatgacgatgatgtagtagtagtagttgggccttcccaataaggattttcatcactttctactgatggtggaacccaaaaaggattagttgtttcttgggtatctaaatttgtattttgagtagtagtttcaggttcatctgcagcagttgtatgaatttctaaatctgaagttgttgtaggtattgcagcattataacttggagcagcattagtatttgacaataataaaagtattgaaaatataacagtattaaataattgcatgattagttttttttcttctaaaaattaaaacaagaataggggtttaaatgagtgactatattctaaatgttttcttttttgaaaatttaatgattgtagaagttggtgatatgtctaatatctaatataagttataagttgtattatttacttgagagtttctctgataatgaaaactctttgtaaacttatagaatgatttttatatgaaacagtggtatcaaatgaggatgagttgatggcaattaggttatactaagggggggaggcactttccagatgagtaattagtgtaaccttttgagtaaatctaatgccaaagagataggcaagatgttgatcagatataatcaaaaaataaatatcaagaaagcaagtagcaaaataaaagaaaatagtggatatagattggggttgggcctggatcgagagtaataaaatattgttacaataaaagtaataaaaataaaaataataaaattgtaaacaaaagagtgaaaatttgagaaaatttgagaaattgagaaaattgagaaatttagtgaggaaaaggccgaaattttttttcagattttctccaaagagttaacagtggcaaatgttattacataataattgtttgattatttaatctgtgtttgtctcctttattatactctttctctcttttgaagtatctacatagaatacagtatgtgtatacagatagagtgggtaatatattaatagcaatactcaatgctaatagtcattactagtaattaaccaatgctatataccaaatatatcaatatttatatagtaccaatacaatataataaacgcgtacctgcgtcaacgcctacaatttctattataattcctattgtcctcagcgaaattatgaaacaattactaactattatggtactttcccctttgggaatattattatcttagcttttttcaactttaattaaaaaccgcgtttgtccctgattatgtaagtgttgcgtcgataggtcggtgtgtttgtgtgtctgtggtcccgtctgttttgtaaatagccatcatgatatattaaatgattaagaataagtcttagttgataaacccacttgattgagtatccttttggacaaacagtaaattctaaacatgtacatctaatcaaattgatccctttggtgataacaatcttattgatgatgatttccaaatagatgataatatcaataatcataatataaatgatgattcatttatacaacctgatgtacaatcaaaaatcaataaacctcaatctcaatctcaatcaatctcaatctcaatctcaatctcaatctcaatctcattcaataccttccattcaatcaaataaaacttatgaaggtggtttcttttctctaaattattatagacaatattttgatttaaatactaaccaatttttctcaaattgtctaaggacactgaatccaataagtgtacccaatgctgatgaatttaatcataatggtgatttatatggttctgtttggataactgcatctttgatattcttattgtttttctgtaattcatttgcaagtttattatctggctggtttttaggaattgatcttgattcattaaatataaattattttaaaatgattgtctcatctattaatttattatatgcttatacattaatcattccattgtttctctatttaatactaaaatattatcttaaagtattaattctagttccattaactaaattaatttcaatttattcttatgctaatttactttggattccagcagttttattatcaatttttagaggtttattagtaaatttacatactttagactctccttttgaaatgggggtgtattctagttggtgctgtattgagtggttgctcaatcatttacaaactaaacttttacttcaattcaatatttggtaatgatgataaaaaatctgcttatataatattatcaatattagctatttgtcatttaggcttctcaattggtgttaaagtttgcttctttggtaaactataatctaaatatttcaatatgttatatgtgtgtaatttattaatttaaaataaagaccaaaaaatactaaagtaaagtaaattataaatgattttagaaaagatttctaaagttgacattttccttatcagttagatcagcaaatctaatattattattataaaattacctgtacaataaccaattaaatatatatgtaattaactgtaattttctttgtatgacctgcacaactaaaacatgattaccaacaaatcatacctacaaacgctaacatacatgatgcaattaataaaacaactataccagctatatattaatatctaataatgctttcctttaattgatgtaatttacagtgtttattatcaaagcttggaatatgtaataaaatcataaatccaactgagattgtcatacattcaacaacaataaataaaactttccatgcaggccaattaataatcattaaaacaaattgctaaaccatatgcaattaaattacccatgattgtactaaatccattacacaaaaatcaaattgcaattcctgaaaattgcacatctgctttatactttagacctactttaataatcatggtccgattgcaaataatagatgtactattttccaaaaatatagtatcattaaacacatatggcggtccataggtgagttgaacaaagtttaaacaacttgacttttatttaagtcactttttagtcaaaactaactttataaaaataaagaaataaaattcgattttttctagaaccactaagcataaatgcttttaaaattaaattatggtactttgcaatgtacttgtatatgccttatgggtttagatctaagaaattcaacgtttttattccatttgcagatttttttatttaactaaataacatgccgataagcaacgtgcctaatttttataggagaaaagcacgagtagctcagtggtagagcagcagattgcaaatctgttggtcgctggttcaaacccggcctcgggcttttattttttaaattcttatcattttattaatttttttgtatggtgacttctatcctcattaaaatttaattacctccgaaaagcatgtgctgccaaattattacctactttttactagtatttacactttgtttttgcattgctcttacctttttaatttacatgacttcttatcaaatagttatcattacttatatggcaacagagttaccacttataactgttcaggataattgagagataatcgaactaagtaaataaacttttcaaacttatcaggcataaactttttctttaataacgataagaataacaactaataacaaaaaaacaacaacaacgaaaacattaacatatatgaaatacattgacgaatttgatattgacttagttaatgaggcattgtcctttaatacattcaggatatgcatattcaaggtacctgtgatttatttacaactaaaccagtaggtgcagataggaaactttataaagtattagataaactctataatgcaaacgatgaagaaaatgaaacaaatggagattcaattaagcaagaacgccagaattctaattcttcaatacattctaatttatcatcaaaatcaattgatggattaaattcacaatttattcaacttaaaaataggtcattttcatattcttatactaaacctctgaataatgatgaataatgaacaaaataatatgaaaagatcacattcatttcattcaccaactccatgaacctgaaattattaatcaatatgaacatgattcaccatttggtccattaagtcaatcattcttcaagaaaattatttggttatttaattggtgcattgaattcaactttcccagatcatgatttttcaacaattcaaccagataattttactttattaccatctacctgctgaattaattacaaaagtaaattcttatttaatttcatcaggcaaatcatctggtttagattggatatggcaaacaattaatactcatatggaattagaacaatgtatttgtttccaatttgaacctcaacaatcatttcttgatgatttaggtgttatttggtcaaatatgtattttatatttaataaaaaaaagaaaagagttgcatttctttatttacttgcaactgttttaaatgaagcatctcatgatttaactaatatatcaaaaagaagaaatagtaaagctggtactttagatgaggaaggtatgaaattaggtgaagatgataatgaatatgatttaagatataataatgattatgagcctatatatgaagatgtttttgaagaggatgatgacgaagatgatgagttaatgggtaataatataatacaatctcaaatgaaaaatggaatagaggaatttgattatgatgaggggaatgattttgaaatgtctgatgatgaagaaatggcaaatataaatcaagatgatgaaggatttgtatgattaattgaatatgattaataattatcattatgatatttgctaacaatttgcaaacttaaataacaaattcaacaaataaaaccaacaactaatatgtctacactttatactttcgttttaatacttatttaataaactttaacaacaataatcaaatgaaatgatttcaggaattgaatttcttgtaaatgaaataggaattcttagtatccttcatagcaaccataattacagatacctacggaggctcagctattcaatctgttatcaataagctgaaattattttatagtatcattaaatcacctcttttgcactctaaaaatacataatcatgttttttatgccaacaccaacaccatctacttaatactaaccaatcaatactcacaatacatcatttaatcatctcagagaaaagagaagctgctattataaggcaaagctactattatactactacgcaagacttcactttgtaagaaatttaaaaatttcaacttttcgtgtcagttatatagtcgtaacttttcatcaaaattgagcattgaaagcatcaacaatattactatattaggacaagtcaatggatctaacacactattttccctaatagtactttgatagacgactaccaaatatgacaatatactgagctctttaagaaaaagtaaaactacaacaagtgaattactactttcttcaactgaatccatttctaaaaaatcaggtaaaagagaagatgaactaaatgaaattataattaaactagaggaagagacaaaattgaaaattaaagaatctttatattctccattaataagtccattaataagtaataaatccgaacaagaaaatttaacatactttacagtcggtgatgaattcattgataaggctttgaatggtggtataccaatcggttatttaagttgaaatctcaggtaaatctgcaagtggtaaaacgaatttcttactgacgttatgtataaccattcaattaccaattgaatttggtggtttaggcgcatcaatattttcatcaggtaactagcaatagtgatacaaatgttaaaacactgtatataccaactgaatcatcattagcaactcaaagattagaacaaattattgagcacttttcaaatcttttggaaacgaatggtatatcaagaaataattcacaatttttccctaaattagataatgttattacaacatcaaatataatgtctaatttagaggaacaagatcatattttaaaatatcaattacccgttatattatcgaagagattcaatgtattaaactggttatattagattctttaacacatcatttacgtgttcaattaccaggatataaacatgctgaatatatcaaaaccacttgtacatatttaaagaaattagcaaaaaaatttaatataacaataataattgctaatcaagttactgataaaccagttaatggtatatactctgaaaaaaacaatctttcattgaagttgaatactgaatatcaacttggttggatgtcaggttgggatgatgttaggaattatttatagacattcaatgagaagacaaggattgattgatgaagcaaacaaaagttttgaaagacttgattatctagatgaaattcaatcaggagattatagtaattatacaaataataatgaatattcaactgccgtcgaggatggtaataatactagttttaaagatatcaaaaatattttgaaaaatgataggaagagattattcgatagtagttataaggtaaaagttagtggaataggcacacgaccatcacttggattaccattacttaattttattgatatgagaattgttttaagtaaagaatatgctccaatattaaatgagaacttgataggtgaatttagtgaagaattaggattaaatacagaggatgatattgacgaaataaatatgacaaacacatcaaccaattctgatgttattgaaacatcaacacaaatttcaaataatgaaagtaagaacgttgaaaataagaaaattttaacttcattgtataacaataattatttgaaaaactataattttcaatcatttagaagaatgaaatgtgttttcggaccattaataccatctggtgagactggtgtagttgattttgaaatttggaaaggtggtttaagaaaatacaatagttgattgccgtagaatgttatgattcattaatagtttgctgtttgatacattacatcaatgaatctaatacttttaaaaatgattaatgtattcttgttgattcgaagtatatttaacaaaggtagagtaaaacttagacggtcagcggcgcagcttttataacttttgttgtggcgggtgaaaaaaatatttcagcatgaaaatttggcaaactgtacttacttgtagagtggaatgaatatatatcaatgtttagtttcccatgcttaaaactgtatagaacaaactacttaacaatgttacgaataaaatataataaaccaaatatacccaaactaataccgaaattacagaaatgtttttacagtcaaacatctagaataacgttcactaatttagaagatcatcatggagatatacccaatcagaaaacgtatatgccaatcaatttaaaagatttatcaattccaagcaaaaagaaagagaaaaatacaaatcaacttaataatttgcctaccatgggtcagatagatttggattccttcaatattaatagagtagaaacttcattttttgacgtttctttactccccacttggtatgaaaggttaaatcaaccttcgacatatcgaatacataaagatttagaaagtactagttttccattccgaagtttccgaaaatgttattctagaatattgtcattatattttgatacctatattacattacctccatcacaaatgtacgagttacagaaaaaattatactatgatagagaagataaatcacatatacctgattctgtacaaaaactagaaataaaaatagatagggtaaccagaaagttaagcgagttatcattaaacacatatatcatatttaaacgattgggtatacgaagatcaataccaccattttatttacatcaacaattttcagtgaatttaaatgaaagaaatttatccaatttattgaacttatattttgaattacccaaaccaagaccattatatttgagacgtgatgaacttgaacagtttttaagtttaatattatcaactaaagtatcaaatgacgataataaagctcttttaccaaaaataattgatgtttttgaggatatgtaccaaaatgttaagtcaaaatcaatggaagattttcaattgacgccttttgaaaatactaaatatttatcacttttattaaactattggaaaagcaaaaatatgtcacaagaagaaaaatttaataacatcatcaatcttagaatgaactcattgaaattttgtcctgcaatgtgggatattttattatcacatttacctgaatattgtaatgaaataatgaaaatcatgtcagagaaaagtggtttaactagattatcagctggtgttttcatgagatatttgactacatacgatgaattaaataatacattagaattaatgaaactcaaaaactaccatttagattcagaactgttggatatcataattaccaaatacatcgaatttgggaaaattaaggaagcaaaagaactaatgattgaatttttcaaattttcatttgatttatcatcaactaactgggaattcccaacattaagaaaatctagaactgaattattcaaaattgatgtgttgaacaaaactttacaacaactaaaaaatgaaaattttgatgatccaattacattctcttggctaagatataaatttaaaccaaatcccatcactatggggaaccttttgacacatttagatagtttaactgatgaaaaagatttacttaatataatggtcgaacagaaaatacctatctcaaataaacatgcattaaagttactgacatttcaaacggaaaatcttgcggatagaataaagttttttgaaaatgtcccattggttttgaaactagtcaatgaatcttatgaatttaatgataatttacatgttgcatccacagactcaaaatacgacacggaaacctataaaaaatatgttcatatacctactggtacatcatttgaattaaaggaaattgttaaaactagtatagaaatttatgaagaaatcagtacaaattccacattctataatattagagccaatctcgcaaatcaattggttcgtttaaatgataaattgaaatacttgtaaaaaatattaaattcttgtaactgttcttatactttaaaaaagaaattttcttatagataatagtatagcttttcataaacgatttatagataatttttatgctacaactttattgaacaattttaccttttttgtaattacgcaagaaagttaaatcttcattaatttcatcagcctttaatgatggacaatgttgaacacccttattttgatgttttatactcatcttctccttccttatactacctttactaccatataaaaattcattcaatacaggattttcagtcataatttttgttgaatcttcattagcagatgaaacattaccgttgttattactattataatgactattaccattaattaaagttctctttcttgaattagttgcagttgcattacttgaatcatacgagtcatcatttgagttagttgcattaggatcatttgataatccatcattatttctctttcttcttgatctacgttcaccagaaaagaaaaagctggaattagtatcaaacccagatgtgttaccatcggtattataaccattattattagaatttagttataatactatcgttaaaattagatcttgatcttgatgatgtatgaagattgacagattttgaagatgtaacgatatcaattaatgctttatcttcctttaattgttttattttattaagtaaactttcttgcagtttatttttaaccagttcaacaactgatttagtattttcaacaatttcatcatattcttgttgaaacgatttattaataaaattaacttgatattcttctgctaatcttaaccttacaagttctgaatctctccactcttctaaatctctagttttttctaaagtctctgcattttcacctgaatgtaatgaacttaatttatattgtaaatgaattaacgaatctctataatgaacatctttatctgctataaatctttgatctaatttagccaacttactctgtatttgtattctcctacgtgtacgcttagtaagatgttgttgagcattagattgatcatattgatcttctggatccatcatattctgttgatataaagatgctgaatattgttgtgatggttgatgtgattgtgattcatatgtcgactgtaattgttgttgctgtaattgttgttgctgtaattgttgttgctgtaattgctgttgttgttgctgctgttgagctaactggtattctgatgttattggaacagatcctgatatttgatcaagtataattggttgctttgattgtttattgacttttggtttcacttgtttaacttgtttcacctgttttggttgttttggttgcttggtctgtttagctggctttggtttaggttttgtttgctgaacagttagagattgtaaaggtggtaaaacagtaggttgatgttgatgctgttgttggaggagttgctgttgttgcaagtactcttgttgttgagtattgtttaaatgaggtggttgaccatcatataaaacatgtcgtggtaattcaataggttgttgagattgtccaaactgatatggagagtattgagataccatttgatgagttggatattgattatatgagagttgttgaatttgaaattgttgcatgtgtttaagttgttgcatttgttgaatatgttgatattgttgcatttgttgcatttgttgcatctgcatttgttgttgcatttgttgttgatgctgttgttgctgttgctgttgctgttgctgttgctgttgctgttgctgttgctgttgctgttgctgttgctgttggatttggatctgattggcttgttctgtatccggtaccgatgcagacataccatgaccatttggaacagttgaattcattactttttaattttcaaacaaacgatacaactcaaatgccttgctagaaaggaaaagataactttaaaaagattattaaactgaaataaacagaagttaaaaagaatcaagataagtgaatggccaatacacagtaactatcaagggcctccttccactttctgcccgaacattgcaaaaacaaaaattatttccactgtccgttttaggaaacccaatgatatcacttaaaattttttttcacttttttggatttaatttgtgttctgttcatatagatataagcacttagatatttgaggtgaaactatagttatggtaaacacaaagtttgtcattttagaggattcgaaaaacatcaaaaatgtcaagtctgctttggaaaagcttaactggttagataaatcaaccaagatcatgcaagatcctagtacgaaaagtttcaattacctatatcgacaggaagtgatatagatttgactcaacttcagcaaaaattgagtgattcaatacccaatgtgaagtttaaggtcattttacgctcaattgatgacgaagatcactcaaaatcaaatggaagttcactacaaagcatattatcacagataacagaaaataaggaattggttttgaaacttgtcaattcatttcctaaaaaatattccatatacactccattacttctattaccaccaaaatctttagagtcagaagaatggacctctattcttaatgatttggacaatgaacgaaaacaaactctcttcaaatcaattcttgatatttattcaacaccatctagtccattaacacatttagctatcaataaaccaattccagagtctgacaacattatcagatctcctgtacatttaaccatgttatatggagatttcaacaatttttggtgtcatacagttcaaaatagtatatatcaaacatggatgcctatacacacaatgttttcaagaggtaatattaaagaaaaagctagaatcttatctttaaataatgaatcatattctaatataaattgtaataccgatgttattgatatgtatgcaggtatcggatattttacactttcatatttgaaaagaggtgcaagaagggtatattgttgggaaattaatgaatattcagttgagggtttgatacgtggagtgaagaagaataagtttggtgaatgttatcttgttaaaagaaatgagaatattgattattcaaaattattaaaggcaagatgtgttatatttcttgaaagtaatgaatattgtattgatagagttgatgagatgataaacttgggtacgagttttaatatttcacatatcaatctaggattacttccgacatcggtagattcttggccatacacttgcaaattactagataactatggtgataagtcaagtagttggatacatgtacatgaaaatattggaacggatgagatagagggtttcatggataaaactaataataagttacaatctatgttatttaataagaaaattacgcctatatggttagaaaaggttaaaacatttgcacctgatgtctatcatattgtaggtgattttaaacttatagaaaagaattaatttttatcattcatagctatataacaatatagatcatacatttatataaatctttctttaaatgtttttgctactacttgaatcagcaatagttttagttgatagcttatcagagagaacatcagatttctttgaactctcagctcgtttgattatttcaaggtaattagttggaatatatcctatacgaccatctcttgatctacaatgactccaaccatctattttgtttaaaattgcaactaaatcaccacgagttacttttagttccttccacccattaggttgttcatcttcacgttcaggaatataatcatatgttgctcttgcaaattctaacaaacgtggatcaatagtagaactatttgtatttgatgtagttatattagcattagattgtgaatttacttgttgttgaatttgttgttgttcgatatatcgcacaaattttgacattaaaacaggcaatcctatcaatgcaactaagaaaactattaaaggttttaaacttaatctatttgatttacttttttgactgtttgtattagttttaggaggtaatatttgaaccagattgaataccatttctccaattactgaaatcttgaagtaagctagttgatccattaggatttgaatcattaattccgtttgataatcctaataattttcttaatattcttttcaaccaagctaaaacagcgtataatccgagtggtccattattaccattcccattattaccagttgcactatctttaatttgtttaaaattattaccaacaccaacaatactatcctttatagctgtactcattccaccaaaatgacttaattgatcagcaactcctaaaattgtgaaaaaactattatgagttgcataatatgtactttcaagtaatgcagcaattgaacttactgcataaacaacattttccaaaacttggaaagttctagttgttgcatcagctacaccatttaatggagaattaacaccattcataccatttaaaccacccattccatttataccacccattccataacctccataactattcattccataactaccataactacccatacctcccatacttcccataccgtatctattcataccacctaatccacctagtcccataactactaccatatgaatttccataactaccataactaccatatgtactattagttattataactattcatatttgatgaagtataagaatttagcggggtggaagatgattggtttgatacagaggcagggatcggaggtatagttggagtttccgtactattatttgttgtagagttacctactgttgtagataaaggaatactagttgtagattgtattaagtattagtctcccaaggcttcggtcttgcttgtgccattgttcagttgattgtacagttcaaaaagaaacagtggagaaagaaagggtagaaaaagtgaacatcagaattttcacctaaggacttcttcttatcgcgataaaaggagtgggaaaagcttaaattgtttatcagatcaatttaggtacttaggattgtgggtatcctctctgtgtggaattagttgtgtttggtgtctattttggcttgttttgaatgttattatggtcatattaatttaaattatactgtattacattcaaataatatgtttgaactgaattgggacttaatttgtataaatagtaagtagttaacaacagtaatcatgccacagtcgcgacgccaagaaggttaaatgttgatatccccacattataattacttttaatgattaataaaacggataataataatagtatattaaggaatgttaactgagtcaaattagcaaaataagaaaagaagaaagaatatacatcataaattaataaatatacccaaaaatgaaaatgaaaattgaagattgaaattgaaatgaaactaaaacgaaaaagtttcattaataccatttaacaacaactttaccagctgccttaccagactgcaactctttgataagcttccttcagcttgcagtgtatgcatctttaattgaagtcaattgaaaagataaatttgttttgcttatataaagtttcaactgctttaccataagtatcacattgatgaaggagaattggttcaatataatattttgataaacctaatttaaatttaattttattggataatactctgtaacttggtaacatgttgtataaggtaatattagtataatcaataacgtaagaaccaccaacttgagttaaaataccattgttatcataagtttgtaataattcattaaaataatccataacaatttcatctctaacggtatcaacaataatatcaaatttaccattgactttaacaaattctaataattcattaatctttggtctatcaccctttgtataatcaattaaaatatcagcaccacatttagtaattttttcagcagattttgaagaacaagtagcaacaacattaccagctttaaagaaatgttttgcaaattgaactgcataagtaccaactgaagtacctgcacctaaaattaaaacatttttaccttctaaattgcccttataacaatttaaacattgatatgaggtacctgaagcaattggtaatgaaccagcttcttcatatttcataccttctgggattttttcacagataacagcatgttgcaggttcaaagataatatattcagagaatgaacctcttaattttatagttaaaatatcaccataaattctatcaccttctttaaaattagtttctgaacctgccttaacaatgagaccagcaaaatcaccacctataactctatcacccttagtgaaccaaccattgttcatacctttgaaaacacaatcaacaggattaattgaagttgccttaacttgaactaataattcagttggtttaataatttcacctggaacaacaggaatttcaatttctttgacagttaatggagttttcttgtttaaataagtaactgctttaacttttaatttattatcgacaattggaagtgattgagtagacattttttttggctctttgatttgtgaataaagttaaaatatcaaagaattgaatgaaatagaaaaccccaaaaaaattaaaagagctagagaatttaaaaaaaaactttcagaaagaattaattaatgctttataaccattatctcaaaactaaaggaaagtgtattaataatatttattaattaataatgtcacttcccttgttaaaaaaaaattaactttttcaatctccgcggactaccgatgatatgccgaaacttctagaaatctaaggttctttacaacagtctctgcagtttgttaatatcgtctagtagcagtaactgccaagagaggcttacagttagatataaccattacaattatgtaatattaaatatctatcctaatgattaaatatgaataaaaaggatgttacatggagatttatcaaagattagtgcggaattaaacggaatttagtcttatagagtatatttaacgaagtttaatatggtagagtggcgcattaaaacattaatggttagtaatcttcactacaatcatcaaatttaatgttttcagtgatggtttaaaacagtccatatgatttaaacactttaaacactatcactttcgttgtaatttgatttggaatctgctttaacaaaaatacctgcagaatctccatcaataagttatatcaacaaatgtaaaccaacctttattcatacttctcctacaacaatcaattggattaagtgaagtagttttatcttgaactaataattcattaggcttaacaatactagtacaattgggatataccaattaaagaaaaaaaaatctaatctttaatctaatctaatttaatctaatattatcgaagaacaattccgggaaatgaaataactctatttattaataagaagaagcttgaaaaaccggactttttggctagatttcgttatatccgtatttaaagacaggagcccttattttgacatctctcttacgaatatcatgcttttctctaagttttgtagttttttttcagtttttgttattatgctttgtttttcattagcaactcctatattttcacaattgagatagtgataaacattatctcttaagttttgactgcttttttgagttactagatgcaaattactatagtagggtcataatgcatttattcccacgattgctatgctttccgacgggatgttaaattataaaggtttatctttgaaattaaaatctataaagtactaacaattaattaccatttaaaaacaactttaccaccaactttaccaccttcaattaaatcataaccttcttggaaatcactataaatatctcttactgaattaattgaaaaatttaatcctctctctttataaagttttgcaattacttcaccaaacgtatcagaactatgaacaatttcagtttcagctttataatttgataagcctaatgcatatttagtatattgtttaactcttctgaatgatggaagtacatcaattaaaccaatatttttaaaatcatcagtatatggaccattaactgtaacgaaaactccattttctttaaaagtcttcaataatgaatcaaaataatcaattataatttcatcccttacaacatctattataatatcaaatttaccattaattttaacaaattctaatagttcattgattttagaagtatcacctttagtataatcaacaaatccatcagcacctaatttaagaactttatcacttgatcttggtgaacaagtgccaataactgttccaacattaaagtaatgtttagctaattgaactgcatatgaaccaactgaactacctgcacctaaaattaaaacttttttatccttcaagtcacccttataaaattggaaacattgatatgcggtacatgaaaccattggcattgaactcgcctcttcaaatgacataccattcggtattttctcacaaactaatgaagttgatggatcaaaaagaatgtattcagaaaaagtacctctctgaaatacttccataaatgacccataaatttcttcaccttctttgaaaactgtatttgaacccgctttaattacaacacctgcaaaatcacaacctaaaactctatcacctaaccaacctctattgaaattcttcattaaacaatcaagaggattgagtgatgtagcctttacttgaactaacaattcattttgcttaacaatactaccaggtgtaatgggtatactgatctctttgatagcgagtggagcgtatttgcttttataagtgacagctttgacctttaattcattattaacgataggaagtgtaacacttgacattgtttttgtttaattgtataatgaatacaatactatcttaaagagaagcattatttgaaggatatatcaccagacttttatagtgaaaaattcgataaaatgaatcatatagagaaagcacggtaattcggagacggcaataaaaattactaagaaatgacactatctccagattttttcgttcgttgctagggtcctcattttgataaaccttgtttatttccgtttagtttattagttgttattttctttttcagtggaaaataaatacatttttttaacaatacacattttaattaattaatttaattatatagttttctttttaagcactccacatgctgtaaagttgtggttcgataatactaattggttgtacatcatctttaacgttattactattattattatcaccagtagatttattctctgtagtttcttcgattttaccattactattctttgcatcaccattgatatatgttgttgagttagaatcagaacttggatcatatttagcttcaactattgctttattaatgatttccataacttgtgtaattttattagtaattgattcagtatcattattattaccattttcatttagtgattcaagtatttctgaaacttgtagtactttttctctaatatttaaacattgctttttaactttcattttttctactattaaattttctctttcactaacaacatatctttgttgttcacttatacgtgattctaaattcataaatccttgtaatttaagttcaaatttacgtaatgaaagttttaaaattgatgttataattttatcttgattttcaagttctaatttagcttgtgatttaatattttcaacaattggaatgttgtttgctgtagttgtagttttagttgtagtttcctttatagttgttatttctgtagttttagtctcagtttcagttgatgtacttgaagctgcagatatttgattatttaataaatctaataaacttgataaatcaattgttttattttcttttaattttttcaaatattcaacataagaagatttagagatatgtttaaataaataagtatcttcaattggtaattgaataaatttcattatacattgatcttttgctcttgaaccaacatgacctgcaattaaattccaatcttcaccatacatttcaataccttctaataataataaaatttcattattattccaaggtttattaccattattaaatactgatttttcaagtttaacataatctgaacttttaaaataatcttcaaattgactactttcataacaagcagttgaaatatttgattttgtctttaaattatgataccttgtctctgttatatcattaccagtaattgaacaataaattctctttaattgttttgaattagaattatttgaattactatcttgtaatataaatgcatcatcagcagaatcataaacattttttcttaattgaagatttaatttaacatttggagttatattatttgaaaatttttgtcttttatttgatacttcattagaagtattattagagatattattagatgaatcattagaagataaattttcattaatatcaggagttttcaatgcaaaaccacttggtttatctaaagttatttggaaatgaccagtatattgaggacccattgaaaaacttttagtttttggatcaatttgataattaattaacccccactttgataaaaatccataaattctcattaaacttgcaacatccattgcaatatttcttcttaaagcagtaattgatatatattcaataggatttaatctataagtattaatgataaaatctctaacatttttataaattgttggatttttatatttataatttgatgatgaatcgaaaaaatctggtaaagaatttttttcaatttgatgaattgaatctaaatcaaaccatttagcaaatgatggaattataacaggttttgtttgctttgctaaataaatatttgcttgggtatataaatcatttttattagaatttatattattattattgttgttgtcgttgttgttgttattaatgttgttattaatgttgttattattagtatcattagataaggatacagatgagttctgaggtgcaggagttgcagaattagagacagaagtatctaaggacattgcgttaatcagatttggataattaaaacgccaaaattgaaaatcgaaactgaattaaatattcaaattaaaattaaaatactgaaatatactatactactaatcgactctctcaatgaaaacattatgaaattgcggttgacgcctgtatctgatttttttttctcaacactttttttcgttttctttcctaatgcggtaatggagggcgcgggtggcaagagtcgcgacgatcgcgtctttttggaggggcatttttttattttttttgatttcaactgtgtaacatgagtttacagacgccaggagtaaagtagagttcacgtagagacacgtagagatatagagacattcacgcgtcatggagaccttgtcagaggaaaaaacattagctgagcttttagctaaagagtatggaccttcaaatgaagtctcaggatctgaaaatggtgttaagagtgagaaaatagataaactagatcacaataaactgaaaaaattacaaattttaatagatcaatcaaaggcgttctctcaaattatctcatcttctttagtacaacagaaaactgaagaggaaaagaccgatgatgacgaacataaagctaaaagacaaaaaattgaaacttctcctaaactagatacttataaacaacctaaatcattagttaatgttacacttaaaccacatcaaataattggtatgaattggttaatttcattatatgaaaatggtcttaatggtatattagctgatgaaatgggattgggtaaaactgttcaaactatttccttattatgctttcttttagaacaaggtattcaaggtcctttcattatagttgcacctttaagtgttgtttcaaattggactttagaattagagacttttgccccttctttaactttcttatcatatgttggcgataaaaatcatcgtgcaaaattaagaagaaaatctcttagaaaatttaatgttatagttacatcatatgaaatttcattaattgatttcccatatttgaaaaatattaattggtcttatttagttgttgatgaaggtcatcgtttgaaaaatgctaattgtatgctattcacaaaactaaaatccttacatgtatcaaatagaattttattaactggcacacctttacaaaacaatttagctgaattatggtctttgttaaattttatattacctgatgttttccatgattttgcaactttccaaagttatttcaacttctcagaatttgaatctttagttaatgatgaaaatgatacacaaacagaaacaaacagccaagaatttaaatctcttatatcaatggaaataagaagagctttagttgataacctacatactattttgaaaccttttattttaagaagactgaaaaatgatgttttaacattacctcccaaacgtgagtacattatttattcaaatctatcaccattacaatctttcctatattctcaaatgctacaacctacagtcaatttccgttctcaattactgaaagttacatttccattttatgtgaaatataatttcccagatttagaaaaatataccgaacaatatttagccctaaaggaagaagaaataaatgatgaaaagacaaaagaagtaacaaaattaaaactacgaaaaagtataatatgggaactagatgaacactataattttgtaaaatcacaactgaaaatgaaaagattgtcaaatccattaatgcaattaagacaattgtgtgattctccatatcattatttcttcccttggaatgatgatactaaaataactgatgaaatgattttaaatacttcaaaattacaatcacttgattcaataataccaaaacttttcgaaaaataccctaatcagaaaatacttatattctcacaatttaaagcaactttagaacttttaaatacctattttacggaacaccctaaatttaataacaaaaatagtgtttttccattgaaaacctgtatattaacaggatcttcatccaaagaggaaagagatgaagcaatcaacactttcactacagatcctgatcataaaattttcctattatcaacaagagctgcaaatttaggtttaaatttaacttctgctacaactgtcattttatatgattctgatttaaatccaatggttgatttacaagcaattgcacgtgttcatagaataggtcaaacaaacccttgtttagtttatagattagcaacaaaggcaacagtcgaggaagcaatttgggaacgtgttgtcaaaaagagagttttagaaggaattgtcattgaattaggtgattttgatggttcaaattcttcaaaaaatgttaaatcaaataagaataaaaaagagtcagtacttgactcattattaaatttttatagttcgaaaacttcatatggttcatcattgagtaagtataatgatccatcattgagtttatcactatttgattcaaatcagctaacagagagtgaattagaagagataacttcacatgatttagaaaaatactcagaaaatcatcatatagatgagtctgaaatgtctcatttaagacttctctctgaaagcgatttaacatcacaaactggtttattgggagatgcattgatgtaaaaattacagaaattattcattatatcattattcattaaattacattattttatagatcacaatcattacatttatatttatacattacattcattttacagctttagtaaatatctcattaatttgaaaaacatcatatcttacatttctttcacacaaacatcctttgataatttcgttcaaagttcttaatttaacattattttcagactcaaattccatacattttttccattcctctgtttcccaattaccttccattattttcaatttcagtcttggttcgtaaatatgccaaaatggcagtttaagtacaattaatgtgtaaactaacacaccaaaagcccaaatatcagcacttttgtctaaaggaataggacatggttttaataattcaggtgccgcatatggtaatgaaccaatattcatctcatttaaattcgcagcattagaatcattaacattggtatgagttcgtccaatggtatcagcactcaaatttaatccataattactcttaacacttgcagatctggcaaacgacgaggaaaccgaattggttgtatcaatatcacttgcttcacttgaaatttgattcatctccaataaagctttgttcagttcgttagttatagatttcgttaatttggtaggtaaatactgcttgaatttttttgatatatcaagtgtagaatcatctaatacattaaaatcaaaattagttgttccaaaatcacataattttggtttattattatctaataaacaattctcaagttttacatcaccatgatgtaacccacgtccatgtagatatttcaaacctttagcaattgtctcactgtattgaaatatatcatctatcctatcattcaaacacacattttgtgtttcccaagatttaactttatcaaataaagaaccttcattatatagtggcataatcataaatacaaattctggtgttattttaacatcaagtagtggaacaattgtaggatcggaaagaactgaccaaattttaatttctggtttactgttgaatagttttgtctgatccttcttaattggaataactttgactgccttcacattttcgtaatcattaacatcaaaacattctcttataataccgaaacttccattattgaaaactctccctaatctccatttattcagtatgatcgagcctaatttattttcattttcctttggtcttaaatcaagtcgtctatcaggcgcaaacatttctaatgaagtagatgagtttggattagaaaacgaagctgaattttttcttaaaatcttagaaatatgttctttgtagttagtgtctcctctcaaatcatcaggtaacaaggtgctcaacacttttttcctattactaaatgatagagaataaaaatgttttgggatacttgacaacaccgatctgtcagtatctctttcaggagatcctgcaattttgaaacattcatcagaaactgggaaaaattcagaaatagtaaagtcagctttgatttctgcgatgtcaatagtttttttttgtacattttcaatatttattggctctatagcacattcaggggttactccaaatattgaactttcgtcttgttgtaataatttttctttcttgaattcatgattcctttcaaaagcatcactgatacgacttttacgtttttttgattcaattttgacaatttcttttttctcaaacttatcatcataatcatcatcaacaataacatgttcatcaattccaaacttcttaagattaaattgacttaatgttggaatatattcgtcaaaaacttcttccttagaatatttttgatgaaatatagcacgtttagcatgcgaatgataataatctggttcccaaaatgtgcttgagtctgtagtatcttcatctttttttcttaagttgcatgtcaattcaataccttcatcattgtacaatgttacggattttcttcttcctgaattgaaatcatatttggacaattcattttctgaataagtcttacgcaactttaaattatcagaactattataattcttgttgaatttcttaactgcttctctaaaatcaaggtcaggtatttgttcctcattatcgattgtgtttaaacctcttaaatcaggagctggaactccaattaaagtaggcaaagtatattgtggtggtaattgatctctataaataagatttgttgacgttaaatatgaatagtctctgtatttattccttcgttttctgtctgatcctgagattacactcgatccagctgaggagggcgcatttgacatataatgatgcaattttaccaagtaaaaacaatccagtatatctctgaaaattagatagaatataagatatacttacaagtctatatatcgacttcaagtaagaaatgaactggttaagttgtctttaattgtcaaccacaaacgaaagaaaaccttaaattcaagtaacagtagtctggctttaaatctgacggcaacgcacacaaaaataaaaaaaaataatttcgaaccagtcatttctaacaagtttcattttgccttgcttcaggagggtttactttggattagtattacatcccaactacattcaaaacactacagctttagcaatgtgtaagtcaattcatctattatcccatatttgcaatcttttatctcagaaacaatgtatactaacaccaatattttatagcttttaattttggaggtaattccaacaacaacaataataacaccagctcaggtttttcctttggtggtgcaaacaacaacaatacatccacgggatttggtacaggtgcatctaaacctttatttggagcaggaagttcaactactccagcctttggatcaaatacatcttcaaccccagcatttggaacaggttcaagtaccacaccggcatttggcgcaaatacttcatctacaccagcttttggatcaggatcttcaactactccagcatttggaactggcgcctctaccgcctctaaaccattatttggttcaaacacatcatctgctccaacattcggtggaaattcaactactacaccagcttttggtacaactacttcagcaacaactccatcttttggtgcaagttctactacaacaccagcatttggagcaggtgcatctaaaccattatttggaggtgctacatcaactaacactacagcaacaccatcatttggagcttctgcaactacttcagctacttcaaaaccattgtttggtgcaggttcaaccactacatcatcatttggcgcatctgcacccagcacagctaaaccattatttggagctgcatctactgcttcttcaactacaccagcatttggtacaggatcatcaactcaaccagcagcaaaaacatcaatgtttggtagtaattctttaactacaccactttttggccaaggaaacagtacccctgctacaactacagctacaactacatctacaaccactcctgctacttcaactgcacctaaaacttttggttttggagcaccagcaactccaggtgccacttcaactctcccaacagcaacttccaaaccattatttggtggttcttcaactactgcagccccatcaactacttcaacgggattctcatttggtgcaaaaccagaagataaaaaagaagaaactaaaccaacaacaggactttcatttggtgcaggttcaagtgcagcaccatctaaatcagctggtctatcttttggtggagcatccacagctacaccagcagcaaaatcaagtggtttttcattaggtggtttaggttctaaaccggaagaaaagaaagatgaaacaaaaccagcaactggattctcatttggtgcaggttcaactaccacaccagctaaaccggcagggctttcatttggtacagggtcaactgcaactaaaccaacaggactttcatttggtgctaaacctgaagaaaagaaagatgacgcaaaaccaacaaccggtttttcattaagtggtttaggcggaaagacagaagaaaagaaagaggaaactaaaccagcaggaggattctcattgggtgctaaaacagatgacaaaaaagaagaaaccaagccagcaggaggattttcatttggtgctaaagcagatgataaaaaagatgagactaaaccagcagataagaaagtttcatttgaagtttcaaccactacagcagaagataaaaaagtaccagttaagattgaagatttcaaaccacaacaactatcaattatgaacaaaaatatggaagatttagttaccaaatggaccaatcaattaactttatcatctaagacatttgaatcatatagtgataaaattggagaatgggataaaattttagttgaatcatcagataaagtttctaaattatacaatgatacactacaagctgagcaaaagcaagaaaagattgatcaaacattagcatatattgaaaaacaacaagatgaacttgataaagttctttcagggtatgagagacaatcagataaattattatcatcaatcgaaaaatcaacaccatctaattcatcaagtataaataataaggaaaccaatgatgaagcacgtgaaaaagcatataaattagctgaaatgttagaaaatagattagattcattaggaaccaatttttcatcacttgttaatgaagttaatgaagtaagtgataattttaatagatcattattaaatactgatgcaacagagactaatgaacaaacattgaatgatgttctaaaattgcttaataatcatatggaatcattgagttggattgcagagaatgaaaagcaattaaaggaaaaactcgaaaaattatcaggttccgtttctaaataacttcttttgttttaatattatatacgagtgtttaatttctagaaatttacagtagtttaatttaattaagtttaattccaaaagagaatatattggtttataaaatttttttataaaaaggtgctatttcatttatttgtagattcttttaatctatcatgtacacgctgttgtaaacgattttccaaacgtgatctattagagtcaattttaacttgagatgatggttttggtgaagcaattgaactcgttgttgatgatgaaggtgacataaatttccaagattttgtagatttcaaaatatcattgaaaaacaaattatttgacgaattattcttttcaattattttaataagtgaataaatatcaccttttgaatatttttcaatcaatgaaggtccaaattgatttaattcagaatctgataatccacaaataagtgcagcatcagaaaataaatcaattgatgatggtaatttatcaatttctaacattttctctaatttccttttaaatggactttgtttttctctacttttcctaaacactaaaggttcatctttattatactcaaggttattatcaatattattatcatcatcaaattcaggtgatacagatctacttaaagttgtatttgaatctattggataatgtaataataaagataatgcctcagattcatcaaataaatccatttcaccattagaattaccattaattccaacatcatgacaaatttttgaaatatttttatttaaacattgaagtaattttgatctaattcttaaaattaataaaattataacatatggcaataaaactgatatatcatgaccatttgatacagtatctgacattgccccaacacatgcataagcaattaaaccatcccaaatacgaactgaataagctaatccaagttctctagttaataacattcgaaaccatctagttaaccaaagttgtgattcaatattagcatttttcaaagaagttgctaaaccaggatattttgacgattgttcatgatctatatgatgtaattttaaatcaaagaaaatactttcacgtacaatacctgatgatgtaaaatatttatctattattggtgacattaattgtgtaaacattgcaaatacatcatgttggaaatattttgatgctaaaaattcctttatttgcatattaagattatttattgtattagttttattatctttatttgtatcatcatcctttgtgtcatcatacaattctaccttaacaactgcataaattacagcacataattcatgcattccttgtacataacctatttgttttaaaccttgttctaaacgttgttcattaatccatttagaatatctatataaaatttcaatcattttaattttatcatttttactttcaataaacatatcagggtattctggaaataatctttcaacatcaccaattatcattgataaaatattaatatcagattcagattttgaatttgaatttgaatttaatttagttttagataatggatcatcattatttgatattgattgtttgggtaatcgacgttttgtatttaaatttgatatattaagattagttaaatcttcttcgacatcatctattggattttgatttagatttgatgaattagatgaatcagatgtaattgaagaataataaattgaatcagttggtaataaatgccaaggtataccaattttacaaattaaatcattataaatatttctatgatttcttaaattaattaaattaattgagggtaaattagttgtcaaagataatgatatatcaatttgtaaaagtgaagttttccaaagtaatgatcttgagaatggatacttatgtgaatttgaataaacatgttcacctgataaaattgcagctgctaatgaaggtcttgaagggtattgttttaaaacttgttcaattctatgaatataatcatgtggggtaccattatgatcaagcattgagttaattaatgaggaaaaggaagaaagaaaaggttgaaacaataatcaaacataacttttaaataaaatcatgcagttttcattaaactgtgatcttttaaaaatagaacaggatatgagaaaaagttcaaatgaaagattcgaaacgcggacttgttagttatatagggtggaataaaataagatataaaaacaataaataaaaagtgttattctatatgattaatgattaatgattaatgattactttgttcatcatcagatattttaaaatcagtatcatcatcatcatgatcatgatcactataagttgataattcaatattaacatcattaattggatgtaaagtagattctaaatctggaacagtattggtattaattgtagtagtagtagtagtagtatcaggtttaaaataaacaattgagaaaacagcaattacaatgacaatttcaccaactaatgaccaacctgaaggaattgtaccattagttataaaatcgaaaattgaagcataaattaactgagtataagtcattgaaattgctcttgcagctttttcacgttgcataccagcagttaataaaaattgcataacaaaacctgttataccaatagctgttaataaagaccattgtttaactgtatgaggtattataaatgataaacctggtaatataataataccaacaaatgatgcaattaatgtaaatagagcataaattgaaaccatgaataaaggatgtgcattaaaaccaattttcctaattgcacacattgcaacacctgtaccaaaagttgaaaaaaatgcaaagcaagaaccaataattctaccatttgaagatgatacaatatctgtactatctgaatttgaatttgaatttaaatttgatgagaataaagttaataaaaagtgtggctttgcaattaaaacaacaccaaataaggcaaataacccaccaatagcttcaacggatgtgaatctttcattaagaaaaaaataagccattaaagaagtaatagttggagctaagaaagtaatacaaacagtatctgaaacattaagataaagtaaagaccaatattgaccaccaactccaacaaatccacctaaagctctaaggaacaataattttctaaaacctttaggacctagggggaaatctttatttttttcataaaagcaaaaatataggatacaaaaaatgtaagtaattgacattctaacgaataaaatttgaagcggatgcatcggtacctttaaatccggatcagtgataagtaatttgcagaacattatcatgaaagaattgaaaagttgagataatagagttaatagtacaccagtactgggtatttgtaatttcattgttgatagttatagttataaagagagtggtgtaataaataaataagagaaacaaaagaaagcagatttgatttgatcattgatcattaccgactcttgtaaagatttcaatttcaattaaaattaaaattaattgataagaaaataaaatttttttcaactgtggagatttattgtattacgtaatgtaatatttcttatgacaagaatttatgttgtggaaaactggtttgttttgatttcatgttttatcttattattattattattattattattattattattaaaggttgtttatattaggatctattttagttcattttatttcttttaattattttttttagtttaccattactgtactacacaattatgtactcaattgcacttacagctacccgttctttatcaacatctacatctctatggcttaatgttacacgtcctgtaattgccaccaattttaaatctcaatctttaattagatctttctcaatttcaaatgtttatttaaaggaagctattaaagagaaaaaaactgttacaaagaagaaatctcctgttaaaaaatcaacttcaagtaaaattacttcagctgctgaaaagcaagctgcaaagaaagctttagaagctaaaaaattagctgcaaaggcaaaaactttaaagaaaaaagaagctgctaatttaaagaaacaaaaaaaattagctaaattacaagaacaaaaggcgaaattaactgaaattaaaagattaaaagatgaaaaggaaaaggaaagaccaaagaaacctgcaactggttttattgcttatgttcgtgaaaattattctaaaaatcgtaatggtgatgaaaattcaagaaatgttattagtagacttgcaattgcttggaaaaatgaatctgatgaagttagaaataaatatattaatttaaataaagatgaaatggaaacttataaattaaattatgcttcttggaaggcgaaatataagagacctcttaatgcttatgttaaatttattaaacattcttatgaaaattccaaaaaacctgaatcaaaggaagaatcaattaaacaaatgatacaatttgcttcaaaatggaaatctttaacacctgaagaaaaacaatcatttgcttcaaaataattttatataatgtagtttagttacctaactgcttagttcttttattattattattattattattatatagtatattttttctttttagatgtcatttatgtaacaaattgttaataataattgttagtgaattatcatgtttatcactatccttacgtaatcatatttatccaatttattgttacacatccatcgatgattcaaagtaatcacacaatcaatttattatcatcgatattgctttctgtataaatctctgataccaataaatatttagcatatatattaacacaatggcaaaatactttacaagtttatctgcctttattattttattttttacaatttacgttaattcagcattaataccagattctacatctgataataatgattctgaagaatataagataactgatcttttataccttgatatttatcaatccaatgaaggttcagataaattaaactctgattcaattggtacaattataattggtttatttggtgaaattgtaccaataactactagaaattttaaagaacttgcaccaatttatgaaaatactaaaactttatttcatagaattataccagattttgtaattcaagcaggtgatattgataataaaggtggtcatagtatttatggtgaaaatggttcaccacctccaattgatgctaaaaatccaaatgattttggtccacattttagtggtttaattgatgaaaattttattatatcacatgataggaaaggtagagtaagtgttgcgaatgcaggtccaaatactggtggtagtcaatttttcatttgtatgggtccaactaattttcttgatggtaaacatgtagttttcggtcaagttttaaaaggtatggaaattgctgaaaaaattgttaatgttgagagagatagttctgataaaccaattaatgatgttttcattaattatgcttatggtactaattatttaggtgaggaacaattacaattaactgcattatccgcaagagaaaatgaagctcaattaggtatcgaaaatgatattgaaaataataatgaaaattcaaataatattgatttaactaatgatgttcttaaggatacttcaaatgataaatctgaatcattgaaaattaatgttccaaaaccaaattctgataatacaccagacaatgaagttgttgatgattctgaattaactcaatatcaaaaaaatcatccttcaggattaggtggttcttcaaaacattttgttttattaccatttattttaatcgttggtctggttggtttcatgtcatataaaaatcgtcgtacaattactacaatggtaaggggtccaagatatcgtagaattcaatctgttaattgatatgatccaaacattattgatgttatattatatttctatataattataattttaaatatttatatacctttttttttctataattgattcaacttattattactataaacttcagatttttcccatattctaccacgaatatccttttgaatgaaactatgaatcacatttttgaaccatgttaaatctctagtttctattgcatttaaaatttgaaatttgatctcagatggattcgataaaactcgataaatattatttacatctaatccagtttgtccctcaataacatcaatcaatacccattcatatccatcatccaaacttaccattggttcattttcatattgaacccagtaatcaaaatcatttacaattgatttcaattcaactttatcatttgttttatcataaataatccaatatttaggtatatgatatttcccctttccattatcatcaacctcatttatccatgaacttttatgtaacttattatcactaatttgtgtaaatgatgaggcaccatttttacaagtaccttcatcccaatgaattattattggtttgagcatattattgttaaatttattttcattaattattcttaaatttaatctttgtacactttcaccaccagtataattccaacttgaaatcaatccaaagataaaacaacaaattaaatttgtaacatatgataatataatcaatgcaactaataatttcttaataaacttattgatctctattcttgattgaatccattcaaatgtacttgagccaactgcacataaaactgaaatagtataaattaaaaatttccattcttttttaccatttactgataaaactaaaacatagaaaaaatttgaccaaaataatgtgctaaaagttccaacaccataattaatataatcaatgttgtataattcattatgtttgacatttttaccaaaaattctttttacattgcagaatgataaaatcaggaataatcctgttaataagtaaacaatttcaaaacctggtgcaaatattttcatataatattcagtaaaatagatatgaaaatcattcaatccccaattagaataactaccatcaaatatatcaacaagtgcagatttgaaagttggaattataaatgatgtgttccaaaaataagaatctattcttgaacataggaaaatacttaaagctgcagatattataattgaaacacaggcttctctaaatgataaaataggtttaccaattcttaaaatacctgaagctgagataattgtcaatacagcagtaaataataaaatttcaactctgaaaacaataccaataaatgtaaatacaattaaagatcttgaaatatcaccagatatgaacattgatattgcaaaattgagcaatggtaaacaaacaaaatgaggaacaaatcttgaaatatagaacatcatatgaggtaatgggtaataaaataatgaaaaccatacacctataaatttagaattttgtgaacatgaatgatcaatagtttttcttaatgataagattgagaatgaagatataattgatatcaataatcttacaaacaataattgtaaaatcttggtatctttcaaaagaactgataattcatcattattgtataatttactgattgaggtaggtaataaattatttattgaaataagtaataaacttaaaaaatttgaaatatttttacaagtttcaggaatataaattgcaggtaatgaaagaaatataattgataaagaagttttctttggcatatcagggtatttcatatgatcaaatgaatcaattttatcaagtccgatattaattatatcgtgtaaggcgttaacattgaatgattcatcataattggaatatggtgccagtaagataagtgagatggggacaatgaaaagtaggatatctaatatgatttgtatattcctaatcataactgtgtttaaccttatatctatatatcaatccttcctgctatatgacctatctaaattcaacggtttatttgaaaacagtgataaagcttttcttttatacaatcgtttaaaatgtttttttttttaattttccgtgtcacgtggtgttagtattttaaaatttttttatttctatcactgaatttttcactgttcttcccccggcctattaccatataatggttagagtatagatactgggatattgtatagaaatggatgatattgaactaattccagatttagtaactgatgaaaatgaagaatttcaatttcatgaagttaaaaaacaaatagctgatacttctggtgcaattattgaagaagataaagaaaaacgtgtaccagttacaattttaacaggttatttaggttcaggtaaatcaacattattagaacaaattgctaaacgtggtgataggaaactagcagttatattaaatgaatttggtgattcaattgatattgaaaaatctttaactgttaaagataaaaatgaaaatgaaattgaggaatggttagatttaggtaatggttgtttatgttgtactgttaaagataatggagttgcagcaattgaaagactagttgctaaaaagaaaggttttgatcatatcatattggaaactacaggtttagcagatcctggtccaattactacaatgttttggttagatgatggattattatcaaatgtttatattgatggtgttattacagttttagattctaaaaatattgaaaaatgtttggatgatatagaagataaggatgaggaacacatacatcatcatgaacataaagaggggaatctggataaagataatcatgataatgaacaattaactgttgcacatgttcaaattgcattagctgatgttatattattgaataaaattgatactgttaagaaagaggaaataaagagaattgaaaatagagttaaatcaattaattctaatgtaccaatttatgaaacaaaattcggtgatatatcattagataaaatacttgatttacatgcatatgaggcaactgatgttaatgaattagtacgaactaaaaatacagaatctaatgtacatgatcatcgaatgggtactaaaacttttgattttaaaaaattatcatcattagatgaatttaataattttgaaaaattcttacaagatttattatgggatgatgtaattgaaaatagaaatgaaaatcaaataaataaatcaaataataataaggaaatggaaatacatagagttaaaggtttagttttcattaatgattcatataaagtaattcaaggtgtacgtaagacatatgatgttattgatggtgtacaagatattaatgaaatcgaattaaagtgttcaagattagttattattggtaagtacattgattctgaattaataaagaagtcattcaaaaatcatatgaagtttgaaatactgtgatacaaggacacgaccgagataacccgaagttttgttaattttcaaatttgaataaaacaatcaaaagttggtcaaatttccatagattagaagcatatgattatgtttgataactcgtatccaataatgtatagtacattgatatatgattctataccaactgtataaaccttcaatgaccgccgtggataagataagagattaataatgtattagattggaacgcgataccatttccggtgaaaagataagaaaattttttttcaactatttaaaaaggtagctgtaagaccaaataagttgatcaatatctactgatgataaatgttgactatcaatggaaagtgttaagttaataggtcttgggttgattacaatatgtccaattttggtatatatctttaaatttaaaacaagaaaagtttatgagttcggacaagaaatagtacctttagatattgatgttgatgatatcaaaagtgggagatttattgatagaaaatatatgccatttagatacccgttaactcaaactatggcgttagttaaattagatatgaatcattggtcaattgttgatgaagaatattatcattttatgtctgaaaagaagagattgtttgataattatgaagaagagaaattagcaagtaatccattttataagagactttatggatcagaatatgatcatatttgtgaagaattatgtgaatttgtagttactcattttactactagatttccaaaacttttccaaagagttggtaatgttgtttacaataaattattaaatgaggaatacgatttaaataaaatggatccatttttagttgtaactaaattatcaatggaggattttttcattacagttaaggatgaagatatgaaacaacataaatgtgttggggtttcagttgcatttggaggaggaggatttccaattgtaccaattgttggacaaggtatggatgaaattcataaaaaagttccatattatgaaagtaaattgagaactagtatgagtaaatggtttgataaatttattgatccagttgagagatcatcatggcatattgtatgggataaagatttaaattgtaatgaattatatactaaacatagagaatatcatgatgattcagaaaaatataaggaatatgttgataatataccatttagtgatttttatgtacgtgttgagagacaatcattaattaaattacctaagagtaaggctattattttcagcaatcatccattatttcttaatattgagaaagatttacttgatgtacctgttattccaacaattattcatagaactatgcatgaaacacctaaggatattattaaacataaacattttgatcttctaagacatcatcttgatccttatctattagaagcagaaaagagacagcaagaaatgggtgtaatggatccctataagccagtaagaacacaggaagggttcccatttcgtaaatgatttatgtatataattgtataattattgtacaacgttaatacttcctaaagaagcaattccgcatcgggtaagttagtgaagagaaaaaaaattaatttccatgtacacaccctcggccaatgagaggagttgtaactctaagtaaaagtgggtcttagcgaattatagtgatatttggagagagacactaagttttcattatattgtgtgtataatagattcattaaaggcattacatttaaattcttttttttttgatttaacaacacatcaaataaaaatgactcatcctggtgcatacatgggctggtggggttctatgggatccccaaagcaaaagagagttactattcattccgtttctccatatgcgcaatcaccattacatggatccgttcaaagaggtattttcaattcatttagaagatttaaatcacaaattttatatattgcaattccagctgcaattgtttggtctgtttggactgaagcaagagattataatgaatacttatacactaaggcaggtagagaagaattagaaagagttaatgtttaaattattataataattcatataatataatttttttatcatcattactataactataaatatatccactactactcttattatgcaataagttaattttattttgaatttcattaaagtaaaagaaagttcaatttatattaatttatttatttaattatttatttctattttatatttatataacaatatatcatctattcaatgaaaaaaatcgatacatttttttatcttttcttaattttaatacattatgtatgtatattttgtatgcaatttttttaagtctataagtatagtaaaaagttataaaaaaaagaagaaagcataagagagatgattttaatcagagtatatattcaaatttaccagcatttgatttaataattatttatgtaataagtataataagtataatataattgaattaatttattcagcctttttctccttatcagaatcagttaaatcttcattaaaggcaacataaacataaccaattaaaacgatatttgcaacaactgcagcaatgccaccagagataagagaattttcaaatatactattacaagtgaaaaatgcaattaatggtgcaagtatcatcattgcagtgaaaaagatcagttttttcaaaacttgtctgtagtaaagtatagtaatattataagcaggaatattatcatcaatatgttagtaattcagttttaaatgaaaaagtacagtatctaatagagtgagaatatgatacatacggaggaatatcagccattgtgtgtgtataagtggttgttatcccagagaagataatacacagatcctaatccatatagataatacctcttcaaagactgttgaaaacatgaacctcttcggaaattccgcaaaatcgcaaaatcaaaaaaaagacaccaaatttccgaaatgaaaaatgaaaaatgaaaaaatgacgagcctcccccgctacgccactcgccactcgccactcgccacccacggagaaaagaaaagcactatctccaaatttgatgacttactattactaacatgatgacaagccctctgatttgatttgcttatttattatattgctattgctattgttattgatttgatgacttacatgcatgattcagtatatttcaaggttgtttggtaatttatatttctatctttatctctatctctgcttttcttttatctgattctctgattctttgattctttgattcttttattattctctcttatatctcctctcaataaactcagtcaatgcctcttacacctaaagaattagaacaatacgaaaatgatggttgcattgccattaaaaattatttaagtaaggataaagttaaagaattaaatgatgaaattgattcattacttaattcagttaatattggtaatcatccgaaaattaaatttacaactggtaatgataaagaaggtcatattagtgataaatattttattgattcaagtgataaaattcattatttttttgaacctgaagcaattagtgataataatcataaattaaataaacctttaaataaatcaattaataaaattggtcatggtttacatttcttaaatgaaaaatttaattcaattactgttaatgatgatattgcttcaatttgtagacaattaggttttaaagatccaaaagcggttcaaagtatgtgtgttattaaacaaccttttataggtgctgaagttccacctcataatgatgcagaatttttatattcaaatcctaaatcttgtgttggattttggtttgcacttcaagattgtacattggaaaatggttgtcttgaatttattccaggttctcaaaattatccattacagaaaagatttgttaaagatttaaagaaaggttatggtactaaatttgctccattaacaaatcttgatggtcaatttgtaccaaattcatctgatgaaaatattaaaattaataaattaattgaaaatgattcattatatgaaaaaattataattccagctggtagtttggttttaattaatggtaaattaattcataaatctgctaaaaatacttctgatcattcaagaaatgcttatactttccatgttgttgatggtgcatctaattatgatgaatataattggttacaaatcccaccttctcatccttcaggtactgataattttactagattatacaaaaattatgaataatcaataccaaaaaacttaaatagcattacttttcttattattaactacttttactaaattttttactaagatcttaacctccctttaatttcttctttttcatttctataactgtctatttatactaaaatatactaaaatatactaaaatatactaaaatatactaatcccatctattatcatttgatggattccaaaatccaacttttgaatctttcatattatttaaaatattatcccatctcttaaatgcttcctcatatttaaataaatttggtgatgatgtaattttcttcattgcccaatttaatgtctttaatgaaccaccattcttctttaaactttcattaattatttcatcaactaataaaattttaaatctttgaaaattaactaatttcatataataatatgtatgtgcccttaatgcaccacctgtataaattaatggtataataatatctaatattttaatcaaattaattttagaaataaaatcaatattattactcttacttttcaataatccaatcattgcattatgaattaaaacaattggtatacatgtatcatattgtaaatataatcttcttattaaatcatcaattgctaatggattcctttcaattaatgatctaattaataaacttttaactcttaatggtgcaaaacatttaaataatcttctcttttcactaaatgtatatttcttcttaatttgaactttttcggaatctaaatataaattattttcaatattactggattgacttccatttatattgccaaatattttaactttcctatccttgggtattttgttaaattttactaagttatgataaagttcattaaattctattaaatcttgatccattataactctttcattactttggaaatttctcatattatttgaattgttagaattgttaaatctattatcattattcacattctctccttcaatatcatcctttgaatcattttcatctacattcatcgaatcaaataataaatctgtaacatcattaaatttcccaagttgttcaatttcattattatctactaaatcagtttcaattctattacttatatcattctttaatcctgacataaatttatatctatcaatatatgaaattttatcatcatgttttaaattatttaaaacatctaaaatacctgacccaaatgtattaccatcatctaaaactaagctttcattcattattctttcattcaaaagtttcttactatcttcttcattccatttaaatcctgatattgattcaacaagttcccaaacaatttcattagatgataattcatcattttcttcttttaaaatttgttgatactctatataattcactttatcaacttctttctttctggtcgatcttcttaagaaaacttcaaaaaatataccaaattttgttatactagtattaaatttattaataccatcaatattatctgaatataaccaatttgcacgtaaattccaaattttaataattacttcctttggtaatttcattataacaattgcaattgattctaataatccatgatatgacatataaaattttgatttataattctttggatttaatttacttaattcagaatcacctgaacagaaaccatcaaatgaaaaatttaatattttacaatattttttgaagaatgaattattttctaaaatttcattatatgaaatttcgttatatggtgatgatgttgatgataacggtttggcttcttcttgaagataattgttaaggaatgtagttgtagatggtaacaaacttgcagcgtacttaattgatccataatctaataatttaatatcatcaataaatttgactaatgtttcaaatatctccttatctgagtgatcattgaaaaatgaggaattattatgtttaatattatattcaattattctattcccaaacgtaaataaaatctctctattagaacttgttggagaattaactgatatcatttcaagtatttctaaaagatctaaatatgtataatttttattgaaattatgttttgtttcattttgaaaacttggattattgaaaaataaactcatcaatacttctttcattacctgtgaatgttccttaggttgatttgttaatcttatataaccacccacgtgattctttatgattaaactgttagttttatagtatcttgttaaattttgagatataattttactctttctataagttgaaagatttgaatattcaatattgataacttcatttttaatctttttattagttttaaatacttgtatgaatttttcaatcaaaaatttataataaattgttgatttaataagattatttttaccatccatattatatttccataataatatatttatttgctgatctgggtttattgataagatataaattgcagttaaatttgatacttgaacatgcatatcaattaataatgtctgtaaaataaaatctttcctttcatccataaacgaccaaacatctttaggtgataaatttaaactattcaagtaaatctctttaatctcttcttcacctaatgataagacacgacttaaaaatatctgtaagaacttttcattctcagacttgctaaacaccaattcattagtagttaataatgatttgaaatttttaatttgctttgttatattgagtggtttgtcgtttttataaataattgcagcttttattaagtatatcaatttcaaattgttatcacatactgtattactcaaactgttattataaatgacttcctttaatttctcataatcttgtttcaatgctgatatagaaatatatttcttattatacatgtatgacattgtttgaaactcagtaaatgtatcttgatttgcgaaaaagtctaaatttttgataactaatggattaatactcttaaaagctttattcaaatgtatcataaacatcaatttcatgaatttggatttttgaaatataaattcagtttctaaaagattatttaaaaattggagtaaatcattaaacgataaatttcttttaacaagtatgaatgatgcagcgttgaaccatctatggttcactagtattttcacaatttcaaatatatttttgtcactaagtcttgtgtatttagattcatcaattttaaacgattgctgaaattcaggtattgatctaatataataatttaaaatcaattgtatgttacaggttgctttcttttctatgttttgattaatctctggataagttttatattgatattcaaaatcttctgtaagtataaattctatgtctttctttctcagtagatttaagtattcattaaagtgtttattataatttttgacttgtttaaatattaaaggattagattcaatttcatcttcattaaattcgggttcatttatcatttcattttcaagatcaaaatctaacaattctgaatttgattcttgaaattctctattatcagataattgagtttgatttattatatagttttctaaattttccattgaagaatgtaaaaatgaattcataatatttgataaattgttctttgtacaggaatgatttgacctattattatcaatatcattgaaattaccatcattaatattattttctatttctttatcattaatttcattattattattattattattattataatctaatttagttttcattgaatactgtcgaaatattatagattgaaatttcaatcgtatttctatatttttagataattgtattggtatttttcgacatcgtaccacatacatattatttaacgtttacttttccacaatctctttagattggtttcttattcctttgttgttctatatacctctaatatttcaaagagtttggatgaaatttgtagattaaagctcccctcttaaatttttcatgtctctgggaaatatcaaaaaattatgtgtccgtgcaccattcttacgtaatgatcttaacatagagtattacatgtttagcaatagtacagtatcaactgttgcaactgtatacatcgactaataggatcatatacaataaaaatacaaatacaaataacattacaatcaatttcattaattattttcgtttattgttttacttataggacaaattattatttaattatatcattaaattattttttttgaccttgagcagcaacagctgcagcacctgcagcagcagcttcaggatctaagtaataagctggcttaattggttttaagttatcatctaattcataaactaatggaataccagttggaatattaagacctgcgatttcttcacttgaaatgttatctaaatgtttaactaaagctcttaatgaattaccatgagctgcaataagaacagttttaccagataaaagatctttggagataacatcttgccaatatggtaataatctatcaataactaatgctaaagattcagtttttggtaaaacatttggatcaacattactatatctttcttcaccaaattgtgaaaattcagaagcatcttcaattggaggtggtggaacatcgaatgatcttctccattcttggaatttttctttaccatatttttctaaagtttcagccttatccttaccttgtaaagcaccataatgtctttcatttaatctccatgatctaacaactggaatgaaaagtctatcagatttttctaatgcaatattagcagtttgaattgctcttgataaaagagatgtatgtaaaatatcaggatgaataccagattcttttaataattcacctgcacgagcagcttcttgttcaccctttggtgaaagcttaacatcaacccaaccagtgaataaattcttttcattccaatcaggattgaccgtgtctaactaaaactaaccttgtgaaccatttttctatgtactttttataagatttctaataagatttctaataagatttcttcttactaaacgtaaaaatataaaatataaaaaagatttaccaattgaagataatttaggggaaaactccagaattaaatacccatcagaagaatccacactttctatagtgtcaaccatcccggagagtagtaaaatcacctaataatcttcaatctgtcacacaattcggaatgaaaattcccgggttttaccattagtggaggcggcgtgtcgacgggggctcaacatttttaaattaaaatagagtagacaaaaaccttaaaatttgtagaaatctattcacgtttttcaacggacataatttaattaatttactgtttttactaaacaaccttgatgttagtaccaacgactgatcgttcgttgattgaacctttacagagggaaaattataatgtatgggggtcaggtatgagtcttgatgaatatatttctagagaatgggataattatggtactgaatacatgagatttgatcaaatgaagaaaggtgaagttggtgatgtatattttgtttggaaaaatgatgaaactggtgtaattgaaggtggttgtgaatttttcgttagagaaggatggttgaaaactgaaaatggaattgaaactattaaatgtggtacattaggatcagtttatgttttcgatgaatttcgtggtatgggaattagtaaaaaattgttagatgcatttaatgaaattacatgggattatttacctggtgaaaaagatatatcaatgttatggagtgaagttggtgataaattttatgaaagatgggggtataaagcattagcagaggaaagtaaactttcacaaaatagtaatgaaaatgataaaattgaatatggagaaacttttacaactagagatgatgaaaaaataaaattaatagcggaatcttttaaaatgaaacgatttgcagaaatgaatcaatggccattaaatacagttgttataattccatcatttggattatttaaatggtttgctagaagagttgaagcagttaatggaggtgttgaaagtaattttggtagatataatggtgataattggagagttgatattaaggatataaatatcgctagtgaacctgttattgaagaacctataacatcatcaattccaatggctaaaagacatgatggagttggagttaaatgggaaagaaggggtaaatggtgttggttttaagttttttctgtaatttgtataagttatataataaattaaagaatataaataaaaaattgtcaaaagaaaattatatttttttaacattttatgtactttgaaattaaattttttcaattgtacttttttagtgaaataatagtaatttttcaaaaattttgaatcacgtgacccaaaattatttatttataaaatactataaaaggaaaaactcatacaatccgagatagtttagtggctagaatttccgcttgtcacgcgggagaccggggttcaattccccgtctcggagtaatttttttgatctcatttttttagttagtaaattgatttactaattgttactttgatgtaatgatgtactaataatagtactataaatcaattataataaaatcagaaatttttttttaacatgcatgtaaaacggtcatatacatttttttcgattgtttgaaaaacattcatcagtatattagagctgttgattagagttcataaggccacatacgtgacttttacatacaattgcgaaaattataacataataaaattgaatagatattgtctttctagacgggaaatctgacgattatagtaaattttctgatcaatatattgccaaacaagaaacgttatattaaatctatgaaaattcacactaaagatacccaaagaggatgatataatgtaatgattttaaaaacacggggtaataaatgattcacagctccgatggaatgaaaaaaagcaaaaattaagcgccgtgaaatctctattgtttgttatcttccctagggaattgtattctcttatatagtatattacaacattataaggtgatgtttataacaggattttaatggttatatggtgattattatattaattttaatatgatgttacattaaattattaagctcattttgttacatgtttattacaatatttcatttttcaccacttcactatattttatcctatacacaactcctttattcccccttttaatttgccccattttataataggcatctagtactagaccattaataacccctcaaaatacccagaagaggaaataaaagcacactaaaatcataccttatctactaataatttgcaccaaaactttgtatcgcaaccccactttgataaaaaaaatcataaaaaattataaattggaaaaaacctattttcttataaagacagcccccttccgcacttatcgtcctgatcaaaaggaatataaataaacctggctcagtttactttaccgtgttgccttcttctttgatcatttcttttactcgtttgatagagctatatcatactattaaataggactgtttctaccgagtgggattctttaatttatttatttatttatattaaaatttattaatccccctttgtttttctttattgtatattatcccactagaaagattatattaaaaatattaaaaaaaacagaaaagaaaagaatagaaaaacaaagctgaagccaagcaaaaatgtcgtatttaggtccaaaatctttcagtactatacctttaacctcttcaaatctagcatatctcaataataaccattcagatatgagttctacaacttcaaatgaaaattctaataatattaataatgttaataccccagtaactattcaaatcaacaataataatactataggtgaagcaaatattaatgatcacgatgatgataaaaacatcacttttaatcaatcagaagattttaaatcattaacatcaaatcataacaaacatcaattagaaactactccaacaatagattcatcttcaaactctttttcatccctgattgatcaatctttaaaatcttctgaaacttcaatggtatcaatacaggaatctcattctcatagaactttaatagatatgaatgacgatgataataaaacttttatattacctccacataacaatgattctcaattgttaatacctgaatctccattaagaaaatatgatgttgtatcggtatcaacggattccttacctttgtcaccatatcaaagtaattcaaaaaatgattcgaaagttaaatcagatgataataataattctgctttaccaataccactattacggaaaaaatcaggtgaattaattaaatcctctctaagattaaatactttgccaaggtcaaattcaatgccaaatgctaaatctgttagatttgcaaatagattagaaaatgttaaattcttcaaaaaatcagaaaaaccaaatgctgtgtcatcagattctgttcatagaatgaaagttaaaactcaatgggattttgattcttcaagttcgtcttctccaacctcatcagataatgattatgattattcgtataatagatttagatatacggatgatagttatgagtatgattacgattatgattatgattataactataataatgatgatgatattgattatgatgatgaagaaaatactaataatatgaatataataaatcaatactataatcataccctagaattaagtgatgattatgataatttcctaaatgatgataaatcccaatcttcaaaatggttaattaaatcaaatgattgtccttataatccattgtctcttaattttgcaaaattatcatcaaataataatataatcttggaaagtgttaagctaaactcctcaggtaattcattaattggatttgtttatgctaaaaatattacatttgaaaaaataataaatgttaaagtaacttatgataattggaattcatttgtggaaattcataatgctaattatatatcatcaaatcatattttcaaatattcagactctaattcaacaaattatgataagttttcatttattattaaattagatgaattaaatgttttacatcaaaacaatttaaacctggagttttgtattagttataccgcagataacaattgttattgggataataataatggaaaaaattataaaatttcattagtgaagaaatcattgttgaatcaaacaaaaacatcatcgaaaacatcaaattcttcaaattcttccaattcatcatcaagatcatcatctagatcaaataaaactttaccattatttgaattggaagactcaaacatcaaattaaaggataataataattttaaattggataacttatattcaaaaccctcaactgatatcaatagtttaagatattcaaactcttttggtttaaaaaagattaaatcagaatcttcactcccttccatgaaaccgaactttaatttatccaataaaaaatgttatcacgaaaacaaatcagtttcttctttaagttctaaaccaactaagattgatgattttaaatcatcatctaccattccttcattattttcaactaacagaataccagtatcgaaatctttatcagcatcaccagcattaaagtcatcatcagcttttgattctcatcatctcagtgattatgatcatattattaaacaattctgtttttttacaacttcagattcaaccgagaataacaattgttataattatcaatatagtcataattttacgaacagcagaaatgaaagtaaaaatcattacgatattcatggatcatattcaatttctaatgataacaaacatcaaagtcagcaacatcaaagtcagcaacatcaacaagcaatatcgattgatttgtaatcaatatttctattttaatccaagctataccatataccaaattatatataccaggttaaataccaatttccaacaaattccagttttgacgaaacaacatcggaaattcaattttgaattttattttatttgatttgattagttcatctagttgattattctgcattacaaccaattaattacatgtgtgtttatacaccaattttttattcagttctttcagttcctccaaattttttgtttcattttacttcaatttcagttcctccaaattttttgtttcattttacttcaatttcatttcatctaaaatttaatttattagtttaattttttcttcatttcacttcatttcatttctattgtatttctacttttattcatttattattgatagatacttttccatatcctacacatatattatgttttataaaaccgtgtaatttactttaatgcatttttacaattaaataaaccaatttattataaaatgaattttgacgccgtattacgtaaatacgattactttcagagagaaaaaaattctgacagataaaataaattcatgatactatggaatcgacgagaaatatattttttgtagtgtgaagagggtgctttttgaagatatctgtatatcagtgataatgacatcaaccgaaggaaaaataatgactgaggaacaattatgtgagttattttcacaggtaggatttactgataagaagataaaggaaattgttaaaaacaataaagtttcaaaatcattaagtgaagttattaaagtttctggagtattagaaaataatacaactgaaaatgatagtattaacgcattattacatcatcttgctgctttattaaaaggtaaagaagttaaaggcattgaaattgtagcaaaagcaattaatgaagaaaagttaaagagtaatttacaagttgctgaagcattaaaatatgttgaaaataattataaggaaggtgaagaatttaatgttaaagaatttgaagaagcatctggtgttggtattgaaattactgcagatcaagtaaaggaaataattgttaattttatggaagaaaaaaaggaagaaattgaaactgaaagatatcgtttaattccaacacttttagcaaatgtaagacaattaccatcattgaaatgggcatcacctgcattatttaagccaatcattgatgccaagattttagaaatgattggtccaaaggatgaaagagatgttgttaagaaagttaaaaagaaggatgataaatcaggcaaagataataaaaaaggtgatacaaaagctgttaaggcagaggaacaagttagaaatatgtttactgaaggtttcttaggtgatttacataaacctggagaggaaccacaaaaatgggacgatgttatggaaaaacatcgtgaatttattcaaggtaaagtctatacaagattcccacctgaacctaatggatttttacatatcggacattcaaaggcaattatggttaattttggttatgcaaaatatcatgatggtaaatgttatttaagatatgatgatactaaccctgaagctgaagaacaagtttattttgattcaattttacgttgtgttaattggttaggttttgaaccatggaaaattacttattcatcagattattttgaccaattatatgaattagctgaaaagatgattaattcaggttatgcatatgttgatcattcaactgcagaggaagttaaagctcaacgtggtgttaaacctgatggtacaccaggtggtgaaagattcccatcaccatggagaagtagatcagttgaagaaaatttaactgaatttagaaaaatgagagatggtttctataaacccggagaagcaactttaagaatgaaacaagatattaattcaccatcacctcaaatgtgggatttagttgcatatagagttttaaatgcttcacatccaagaactggtgataaatggaaaatttatccaacttatgattttactcattgtttagtcgattcctttgaaaatattactcattcattatgtacaacagaattttacttaagtagagaaagttatgaatggttgtgtgatgttttacatgtgtatagaccagctcaacgtgaatacggtagattaaatattactggtactattatgtcaaagagaaagattgctaaattagttaatgaaaaatacgttagaggttggaatgatccaagattatatactttagaatctttaagaagaagaggtataccaccaggagcaattttaagttttattaatactttaggtgttacaacatcaacaaccaatattcaagttacaagatttgaaagtgctgttagaaattacttagatcaaactactccaagattaatgttaattgaaaatccattaaaggttgttttagataatgttactgatgattatgaagaattaattgatatgccttataaaccaggtaatgattcatttggttcaagaacaattccattaaccaaaattttatacattgatgcatccgattacagagatgaaccaactaagggttatttcagacttgcacccgaacaaaatgttggtctcatgcgtgttccatttaacattaaggttaaatctgttgaacgtgattctactggtaaaccaactttaattcatgccgaatatttgaatgatccagcaactcataagaagccaaaggcatatattcaatgggttccagaatctgctaaatttaattcaccagtcaaagtatctgaagttcgtgtctataaccaattattcaaatcagaaaatccttcatctcatccagatggtttccttgcagatattaatccagaatctgaagaagttattaaggatgcaatgatggaacctgcattcttagatgttaaggctaaatctccattaaatatgccatttactgatgaaaagttttcaattaaagaagaatcaggtgctgaaaccgttagattccaagctttaagagttggttatttctgtcttgattcagattccactgatgataaaatcattttaaatagaattgtcaccttaaaggaagatgctgacaagaattaattgcttctttttctcattaaatactgtttatctctttataaagaatagtagttatatttttatttttataaacattttgaaccttaacagttgtttcaacatattaaagaagtgagtaaggaaataataagttgacccatgaagtttactgggaagattaacattaacgcggtgggcgtaatgagaaaacttacctaccgagaaaatactgaaattttttttctatttgaaatttttttaaatattttttttttatttcatgaaatacttcatttcattcttgtaactggtttcaataagtataacataatgtcagataataaggtggctgtttccaaagactatgttgatgactctgtcacttttgatagctttaatcttgatccaagattattacaagctatcaataaattaggttttgaacatccaactttaattcaatcacaatcactaagattatcattacaagaaaagaaagatataattgctaaagcttccactggttccggtaaaactgctgcatattgtatacctattttacaaagtatccttgttgataatgaaagtaactcaaattctacaaacgaaattcaaagtgttgtcttagttcctactaaggagcttgctcaacaagtttcatcattttttaaagaattaactatgtactgtggtaaagtttcaagatctgttaatttaaatgaaattgttaatgatcaactcttatcatcaattttgaacgaaaagccagaaattttagtttctaccccgtctagattattatcaatcatagaagccaattccaacgtgaacttaatgaatttaaaatatttagttattgatgaagttgatttaatgataagttatggttatgatgaagatttagataaactaacacactatttgaacttaaagcaacacatgcaagttttcatgatgagtgcaacattaaacgaagatatcaatggattgaaagaaaaattctgtaataaaccagctattttaaaattacaagatttagataatcaaaacagaagattattacaatattatattaaaacaaatgaatacgataagtttttactcatttatgttattttaaaacttaatttaatcagaggtaaaatattggtatttgtgaataatctagatagaggttacaaattgaagttatttttacaaaattttggtattagatcatgtattttaaattcagaattaccaatcaattcaagattacatatacttgaagaattcaataaaaatgtttacaatttattaattgcaactgatgaatctaatgaatatgatgaagaagatggagagaatgaggaaaataatgataatatagaagaattaggtacagaaagtacttcagaaactatcaataatactaaggcaaatgctaaaaaatcaaaaaagaacaacagtaataaagaatatggtgttacaaggggtgttgatttcaagaatgttgcatgtgttatcaattttgatttaccagcatcatcaaaggcatatattcatagagttggtagaactgctagaggaggtaagaatggtatggcattatcatttgttgtaatgaaaaacgaatggggtaaacataaaccatcaagtttaccaagtgcacgtaaggatgaaagagttttcgctaaaattgaaagaacacagacaaaattaggatatgagatgagtccatatcagtttgataataaacaattagataactttagatatagaatggatgattcatttagatctattacccaaactgctgtacgtgaagcacgtttaaaagaaattaaaatggaattaatgacaagtgaaaaattaaagagacattttgaagaaaatccgcaagatttagctactttaagacacgataaagctttatcgaagattagagctgatgttaacttaaagagagttccagattatttacttccaccgggtgctagacaggatgtaaccaaaaccggatttgttccattctctaagaacaagaaacgtagtcaagggaagagacgtactggtgttaagaagaaggttgatgtcttaaagagacatcgtaaatagatatagtaataagttaatataattaatgtacacatgtgtatcatcttatcataatagaatagtaatagtttcctattcaggcaataccgagtcgagtgaatttttccaattttcatgttaaaccaaccatatcttacgtaaccatatttttttggttaatgctacgtgttcaagttcttcgcagtgaaaattttaaattttaacgtgttttgtgaggtttggaatttccatttgagatttcagttatgttatgttatttttgttttctattgtttcagttttattcatttatattatagatttattctttctgaacctcttgaatgcctctaatttctctttacttgtattctattatctttgaaattattttcttgtagtaagtttttctaagttaccttcacaatggcaccaaagaaagctgcaaaggtttctaaagttcaggtagaacctgaagcgaaaacaactgaattaatattggaatccggtgatttaagacaatacccaaaatcagaattatccccagcagtcgttcaaaatagaattgtacacacctacaaggaaagaatcttagtaggtgtcttagttctttttgctttgatcattagagttggtagtttgaatgatccaaacagtgttgttttcgatgaagtccatttcggtggttttgctaaacaaatatattaacagtaagttctttatggatgttcatcctcctttagctaaacttttatttgcattagtggcatttttaggcggtttcaagggtgatttcacttttacaaatattggtgatgttttcccaccaaatgttccttacgttttaatgagacaattgagtgcatttatgggtgttggtactgtcttattcatgtacttcactttaagagcatctggttgtaaaccagctgttgcattttttacctcatccctgttaattattgaaaatggtttagtcactatctcaagatacattttgttagattccccacttatctttttcgttgctggtactgcttatttctatgttagatctgaaatttgcaaaccattttcatttgattggttcaagtacttagcttttgcaggtgtatttttaggtttctccctctcatctaaatgggttggtttatttactttagcttggttaggttgtgcaaatattcttcgtctttggtttgttattggtgatttaacagttccaattccaaagatattgaaaagtaccgcattcagaggtttacttttacttggtattcctgcaattatttacgttttcagtttctacgttcatcttcaattattaacttatgaaggtgatggtgctggtttcctgagttctgctttcagactcgactttaaagattcaactgtgccacgtgaaacatctgctgatgttggtgtcagttcaattattacaataaaacatttaaatactcacggtggttatttacattctcacgatagtttatatgaaggtggttcaggtcaacaacaaattaccctttaccctcatttagatgaaaacaacagatggtcagttgaattatacaatgaaacttctgaaccatttgaattcatcccaattactgatggtaccaaaattagattaaatcatattgttaccaatagaagattacattcacacgatgttagacctgcagtttctgaaaatgattggcaaaacgaagcttcatgttatggttatgaaggttttgaaggtgatccaaatgatgatttcattgttgaaattgtcaaggatttatctgctgatggtgttgcacaggaaagactaagagctattgataccattttcagattaagacatgctatgactggttgttatttatggtcacatgaaacttctcttccagaatggggtcacaaccaacaagaagttacctgtgcaactcaaggtgtcagacctttaagttattggtacattgaagataatgttaatatttacttaccacaagatgctgaaaaaactggttataaaccactttcattctggcaaaaatttgtcgaattacataaaaaaatgtggcaaatcaataacggtttaactgcaaaacatgtttatgaatcaagacctcttgattggattcttttaaatagaggtatctcatattgggcagctgcacctcaccaaatttatcttttgggtaatccaattatctggtggcctgcatcattcttatttgttgtttatgcattataccttgttgttttggttttcaaatatcaattaggttacactattgcattctctgatgctacatttacatttaactattacacattcagtttcttacttggttggttcttacattactatccattcttcttaatggatagacaacttttcttacaccattatttcccagcactatattttgcaattttagcattaggtcattcattccaattaatttcatctattttccaatcaaagaagacaattacatacttattatttggtttaatttttacatcttcattatattgttactaccaaagattaccattagcgaatggttctgattggactgttgaaaaatgtaaggcaagtaaatggtttgatggttgggattataattgtgaaaatttcccatatgaaaatgctgacaataatgcaccagcaaatgcaggtttcaatcaaggtggctatgattttgatgctgctgttaaacctcaacaaaatgcattccaaaatcctcatgaaaacattgaatcttctgttgatgaaccaattcatcacgtcgctgtccctgagaaggatgaattataatcatatctctaatttaggatttcatacttatttattctttctatcacatattattaaacaataggacacaatcctattatatataactgttttttttgtttatataaaatatcttatacaaaaattattaaaatttacacgttcatgaaaatagactaagtgtttttgcttaatgcatggaatttgacaaattcacgccttttcaattcataaaatatatatgagccactttcattttggagttgtcatcaacaacaaattacatataccaaatcatagacatatataaatggctcatttgggaaagttagtttctgaagttgatgagagaataagactacagtttgagacagcggatattgataaaatcacaacagatgtacaataccttaaacagttcattgaaaattttacagtgctattttctacaagtcaagatgttcagactattcacttgataacgttgaatctatacattgagcatgaatatttgatatcgacctctttagaaatgaaaggatatttaaaaattctgtgttttgatttacttaacatgatcgattatgaactggttttctcagtcccgaaactacacagttatttcaataacattctgatggaatattttaatacttgcaatacactggaaagtttaagattatacgaagcttttatcagatgctacagcacaggatatttaaatggaaaactatttttttttgaaatccaaacagtaaatcaattatttaagtgtgaaatgtatgataacatcaacgatttaatcgagaggtataaactttgtgacattaatattgattacattgagaaatgcgctaaagaaaagttgtccacttactttcatcaattgggatacacctgtattctcattgggtcatatcaaaaagcgtatgacttattttttgtgactctatcaatatcagtggaagatgctaggatatgtgattttcaaatgatattatcagagtttgtactcgtatctcttcttttgaatgaaatcggagagaagataagctttccaatactgaaatacaagaataaaataaatgctcaattaatggaatcttatcaaagctaccaatctcatgatgtatactcttttgcctataatttttatatttatatgctaaaactccaggaagatgataacatgattttggttagaattttcaatgaacaaaatttagtaaaactgattcttcaaattattgaaaataaattgaaagtgaaaaatattaagagctcagatttgaattataagaatctggttgagatagaactcaataaagttttaacggaattggaaaagcaaaaaattaatgttcctcaaatacccatagaaataagaactactaaacaacagaccaattctgaattgttgttatcggacgccaaacaaattatgcagcaaaaccaattactgaaaaaaatttacagtcaaaagagccaagaagaatgaaagaattgagatcttttatcttaaaagtaattatacagttttatttacattcttttatcaaagttcaccataaacacctcttctctttgtagtatcatactttctgacaatactttcttgaccttcaacttgtgaaaatgcaaaacctctttgttttttcattctatgaacttgtctaacttttctaatagttttttgaaatgaggaaaatttaggtctatgtgcttgaatttgattcttttgcatttgttgcacaatatgatggaattctggattccattgtcttttatagaatttatagagaaaatctctcattaaacataatgcagggacaacaataatagataaccagaaaacacatgaaccataaacaaatggcatgattccgttatattcttttgaaacattaactttaggtgctataacggcatatagtgggaaaacaattaaccaaaccacaaatgaacctggaattgccaccaatgtaaattttgtccattgagaagaaactaaagcagctttacctaatgatgttaacaaacaaacggaatacaaagtaacaccgacaacccaaatacctgcaatttcaccatcccagaattgattaccatatttatagatattgataacagaaatgtagatgattgcactatgatagaaaccattaacagcccatgaccaaaaaatttcaacattgaagaagtgtccttcttgaccaattttgtaaagctgtggatattgattcagcatatttgctgaaatatattgatcaaaaataccgatgacaaaaggtggcaacgcaacgaacataacattgtataaggttaaggaccaagattcaataattgattgcccactaaaaccattactgaaaacgaaccaaaattgacacatgtataatgtaatatttttgtagaatgaatatagaatagccaatgagattctttgataagaccaagcaccatgaactaataacaacttctttaagaatttaaattgtccgatagcaaaatcagcactccttgatgcttgtgcaccttccataccactgataccaaccccaacatgtgcagcttgaatcattgaaacatcatttgcaccatcaccaatagctaataaaagagccttcttctttcgtttaaccaacttgacaaccaaagctttttgcaatggtgaaactctacaacaaataactgccttacataatgtaccaatttctaagaacatatcttctaaatcagattctaaagcatatcctaatgatttaccatcaataactaaggctaaactacctttatcttcttcagataattcattaccattcaaaacgcttaatttttcaatcatgttttgacatgtatcatctttattatcttcattgataatcaacaaattcatatcttcactcaaaagtttacaactcataccaacattaatagcggtttcttgtctatcaccagttaaaacccaaacattgattccagcctcttgcaaaattgaaatagtttctggaacaccatcttgcaatttatcttcaatagcagttgcacctaaaaggaataaatctttttcaataagttcagcagctttatctaattcctctgatctgtcagttaaactaactgaagctttgttatatatttcggaccattggttatattcttcttcactgattgttctagttgcaatacataatgttcttaaaccttcaacagcgaattcttctaaatgtctagtagtggcttcgataaattcattatcatcagataatctttcaaaaataacggtatcagcacccttaacgtaaagtctaatctttccatcgggacatctgaaaagagcactcattctttttctagtcgaagttaaactcacaaatgttaagtaattcaaatgttaaattttcaccattagcttcaacaataactgaggaaggctttctagtatggaatttataacctaataaggctgcaccttcaactagtgcaccttcatcaggggatgcagcttgatatttaatttcaccattatcttgaacttcaggaataacagtatgacaaactgataataaagttaaaaaactattcaatgacattcttattattactttcgtgtaaatcttttttcatttgatcaaaattatagtaacccatctcgacaccatcttggacagaagcctctttatcttcaggaatgctttctatgtaacaacgaccaccaatggagcaagctttatattccataatatttcttgtaagagtacctgttttatcactgaaaacatatttaatctgaccaagctcttcaactaacgatgaagttctaacaattgttggagtatctgtttcttcacaatacatatctaaatccgaggcaatcaaaaatgcttgataatacttgataatttctacagtaacaaataatgagattggaaccaaatttgaatataaaatccagtaagttaaaatatccaagaaaaacaatccaattttatttgtaccttccatgtataaatagcctaagttctgtttattaacttgaagtgtaataacattacccaaagaagagatgaatgctaaaaagatcaagattccaaataatgcaacaatttgtaagttgataattctttcaacatcagttttcttgattggtgttgcagttgcatttctcatcaatttagtttgatggccggtgaaaatgacaataccttgaatccaaaccgtgtttcttaaacttgcacctcttaaaatcatttgatcaggactcaatggaaattcattaccattaatttccatagtaccttcataagtatataaactactattaggtctttcacttgttattttaccctttaagttgaccaatttatgtggatctattaagtgtaccgtttcttcacgaggttgtttaatttttaaattagtttcaccatctaaattagcagtttcaatgtaacataatccatcaggttcagaggagtttaacaaaattatatcagcaggaattcaattctccattagttattttgacaatatctccaacttttacattaatccactttttggattcatattcacctgttttagagtttaaaattaaaacttttgatctatttaattcgttatcagatgaatttctctttatatcttctgacatttctttcacagcagaaaccaataaaacaatcaataatgttgcaatagttgtatatctattagttggtgtaacagttggaacttgttgaatacatgatgtgaacaaaaagaataaattagcatatttggagaattgttcaaacaagaacttaggtaaaaaagtaaaagcattatatttagttgtactaatatgatttgttgggaatttagccttagcattttcatgtgaatcgtttaaataaattattcttggaccttgatcttcttcaacctttcttttacctaaacaccttctaatatcaaaaatattcatatcaataggttgagaaggagtttcatcatctggtgatctattatcgtgtacattagtatcatcaatatttgcatcatcacctcttgattctatattaacattattataatcagttaaaccaaacttccctttcagttggttgtaaacatttcttaacccagttttatttttaggtattgctaaatcatttaagcttgaattaaatgggttatcattaaatgcattacgatcatttataattgtatcatcaacatcggaaaataaatcactcatattatcatcatcacgattactgttattattatttctgttactttgattaaatgtattcatttcaatcaaattaacatcactgaaaggatcgtctttagattccttcagaggcttataatttttatttgacaatccaaaaatatcatcatcatcatcatttatttcatgatgatcagcaaatggatcaattaaagacgcatccgttaattttgagttttgttgcctaccacttaatttagaacttgatgaatgcggtacatattgaacatcatcttggagtaggtttatggaattattatcctcatcatcatcatctcctataacgaacttgttactataactcatatctgattaattatagaacaactgatatagtaattgaagtgttatccagtagaacaagtagcaaagtttgttgatttaaagaaaattagtcaggaaacttcaaaaataaaaatgaatagatcgattaaaaatttatgttgatagtataaattgatattttcgttacacgtctttaatatatttgaaaattaagttacaatttataggtttttattaatattttatgtaaagtataactatctgtatagtataagaaatagaggacaaaatgtttttaaaatagaattcactatatatactaatttaaggtaacattacattagatttaagcttgaagagcaactctaccctttgggttggtgaccttaacaccaatagccttagctctggaaaggatttcaactctgttctttgcagaaacattgtgtgcaatttcagctgcataagtttcagtgtgtaataataaaacttctaagtcctttaagtttgagacaacgaaagctttcttaccatctggtcttaagaatttagttttcttgttagaaccgtaaccgatttttggagcagaaatggtacctctgaatcttcttctgacacaagaatcaatacccttttgtaatctccaactttcaccaactctgtggtatctgtctgaatgatgtctcttgaacttcttagtgtgctttttgacaatctttgggttcaattgtggagccatctataattaattaataaattgaatggtaatgttagtattatgtttctttaaaagaaagaagtagaataaaatgaaacgagttagaaaaaaatagtcaggtattaatttttcagtgatgattgttatgaaaatttttcaatttatagttcgataaaaaataagttaaattgatgctattattgatacgcaaaagtttactaaataacttatattctaatatgtttattcaatatgtatgcttgatattagtttactatcatagtcctcttgaaagttaaaaaatttgatataagtaactttatgtatcaatattgtagagattttaattactgtgaatcatgtattgtctgtacaattactttcagttatctgtatgtaataatcattatctatatcaatattactatcaatcaataattagcattaacattcactaataatcacattaacttaatacattcacttatttctaatctcactttgtttcaatatgttaacttctgatgttatatgtctaatgtttaatggatagtacttactgttgatgtctgttgtgtattgaaagaaggattctgtaaaataatatgaaaaatatgaaaaaaattaataaattaacaaaatctccaatacagtaaaccaacagtgagagaaaaattgaatttcctcatactaatttcccttcctctctctcactccctctatttttttttttcgtccttcacaacttcccttcaatttctcactacgttttttccacccttgagctgatccgcgtgactgggatttatgttttgaagttttttttccaataatttctcatttgggaaagtatacaccgcgcaccataaaattttctaaaataaaagggttcaaacttttggacagccctacttacacacacgtgacagatatcggataagttacttttttaagaatgtaatttttttttaaaaatatcattacgtaatatattgtaaaacttcatgtacacatgatgcatgattgtaagagttgcactgattattgagagaaacatcgtaataaaaggattttgattgtaatatagtagctctaaacttatttgtttaaataacaattcaaatatttaaatgccgaaaacaacacctcaatctaatcaaacattttattttatcaaaacagacgaaaaattacctcaattaaaaccttccttacacgatgatatgatacgaatgtatcaattagatgatttagcaaatgcattagctagaacgaaagcagatgggtcaaaaggtgttaaattaagaaaatcttataagtctcatatagctgatttacctggtaaacatacaattccaactgaagataaaagttttacccatattgcacttatgcctgataatccagattttacaaagccaaaaattgaattattctcagatgaatatcttgataaagttataaattttgaaaaaactggttcaaatggtataccaggctttgattcaaataaattatcattaacaactattgatccagctgatctgaaaaaagaaagggaaaagaaacgtaaattaaatgtaacttcacctcctgaacaacaacaaatacaacaaccagaactcaagaaacgtcatgttcaagttaaattcgattgaaattaacaatcattctaattttactaaactctataaatattacataaatatttctttactaaataacaaatcttttttttatattaaaaacttaaacaaatacccactaaactttaccttgtatttgtctaatatttcctttaacacttctgagtttattaactctcttctttttcttgaaaacaaataatttattcttaattaaacgaccggattgttttaatattgtcttgataaaatgctttttaattgcattaattaaatcaattttagtccacagctttcttttaacaacaaattttggaattgttaaacttaaattcgtaacattgattagtcttaatttaccctttcctgaaaatgtaatattaacaagtaaattctcaaattcaagtctactaatattcatgtatttcttagctctatcagatatctccaataaatttttaggatcttctgacatatcagaaatagaaacttgaccattcattaattcttcaattgccgatgatgtattgattagtttactatcaacaatacttttgttcagcttggtagaatattcactacgaatattatttgtagctttagaaatattagttatcattgaagtattactattcatctttttcaaggcagatctatcatttaataaactttccatttcagcatcatctgagtcatcactcgaactaaaataactttcaatatctttttttgcatttttataatgtgcattagtattatcgttatcgttatcgtcatgttgaatgttaatacttggcacatagtttgctttctttgtttcatacaatgcgtccttaaatgtgtctttaccattaaacagctcagtaggtgagatttgaaagttaccatctgattttgtatctatacttgttctacttatacttcttgaatttcttttaccaagttgattcaaataatttttaagacttccatcatccatattatcttccgtttcactttctgtttcactttcgtcatcaccttcgtcatcactcacatctttatcatcggaatattcaatttcattagggaacaagaatttcatcaacttatctcctgtcttttgctcaatacttaacttcataggatgacatacaattttgacatcccttatattattcataccacctattttctctcctagattccagttaattttaatcatttctttgactttcgattctttattctctttatatggttctaataattctggatatagaatatcataatcttgattaaatattgcaatcttatcaaccaatatttcattctcagtagatttatcaagcatttctaatcttgaaaacttaaaatcttcaacagcaaacttcaagaaatcaatatcattttcagtaaatacaacattaatattatcacctttaataacccattcaacaaaacatttatcatcattagctttatgttttggatcacattccagtaaaataattttggataataataatgaatgtgtaaaatttttggaaacaatacgatgtaatactttgtcaatatcaggcagttcatccattgaaactcttgcagcagataaggctttatacagatgaattatatcaaatgtctcattacaaattttctccaaactttcgaacaacttatcagtttgatcacttgttgcaagtgagacagcttggaccatttctgcaaatttcttctgttgaggtgatgaataaaccataactttttggataattcttaatgttttcaagtacgattctgaatcaattttagtttcaaattttggaacattcaaatataaattatttctaaatttagtaccagcatatgtattggaagctttttcaaaaacaaagtaaaataaaacatcagataataaagttttctttttgataaaacttgatggctcattcccactaaggaacaccggccatgaagagcatgtaccataatgatcagcatcaatattgaggtcagcaaactctttttgagaaagaattaacaaatctgcatctttaaaaatagtaccaaatctttttgctatatttgcagatttaacgtacttaaaccaatcactatccatcaaagaaataattttaatttcattatgttgtgttctaaataaaattaaatcagaatctgttggatcaatcataatttgaacctgaatatcatccaatcttacaatcatgtcatcaacgggaacaacttcactaacatattgacttacatttctcaatgccttttcaaaactttcatcatcctgaatttcaattttacttttctcttgtttaatcagttctttcttagacatatcaggatcattatcatctgcactttcttgcaatttcttagaaattgcacttctggccttaaatgatgtactataaacataagcagctctaaattccagttcagccaaatattcaaaaatcaagtttctagaattacggtaccatttgaccttcaatgaattaacatcaaaaatatgattgaaattaacatcagggcggttatcataatcaattagacaatcatgagaatcttcattaccaaatttactactattttgagtcttattcatccagtaacagaaattagaagcatgtaacaaaggatatatttgtccataaatatcacaattttcaatatttggcagatcaatttcttgataatcattcacatctatccaactttgatcattatcaaaaatttcaaaattgtgtttaggtgaagatggattaacagcattaccaaatttcaatccaattacacgtaaatcaatatcatccaatgcgaccataccaatataaaaagccattttcataatactgtacttttcatctaagaaatcaacctctttaaccttcttctcttttctctgatgtaaatcacatttaaaacttgaaattttagcctttagactgatagctgttttattttcaggttttgataaatcaattctataaccatgacagatatacaatggttgaatatcaaacatgaatttgaaagtcattaaatgagaacccaacttgacagatttattctgtgatccccaaagattaccagttctaattggtagtgatggatcatcagagaatcttttaaaccatttgaaaaacataagtagtgctctaggactcaatcttaaaatattattcgttgaattttttgcagttaaacctaatgacatatgtatataatctgatctgaagccttcatatgaatcatgattagacttatcttcaacaaattcaggagcacacaaaacattttcaaaatgtgatttaaactcatgagttttttcaccatcagacagtctttgaaattccattgacaatttaagttcaatatcaccatctaaacatatattttgtgatttgaatatattatttctattcaattcatataatttttgagcttcaggattatctccaaaatataggtcagtatttaaataataaccatagagagaagataaaaggaattttggttcatcacattgcagaaaaactaaatcacgagaacaccaacatgggagtggttcaacaaggaaatttggggttccaaaaacaattctattggatctaaaaatgaaataatctctttctaattctctatttgggtcatttattaaccattcaacattatcagtaaacaataaggaaaaaccagaacgaataccaagaatatcatatgggttggatgaatttaagatattgattctaacagcagtgctatcatttaaccatctgaatttaatataaccatgtaagatatttcttaatttatcccatgtacccaattttggacttggatcttttgatattttactaaatgtatcaaaagttaaacttacttgacgtaaaagagcttgataagcagttgaccaagttgccattgtaggagtatcagaatcaatttgacattcaatttcataatatgttttaacagaagtgatggtttttggagcttcccatgaataaaatttgtcagtagcttcaccttgagttaagttttcaaacattggaatatataaatagtaatattcagtatcagactgtggaaactgttcagcaattgcaagtgttgatttaaagacaaacgtattagaccatctatcagaagatttggaatttggaatataaactaatggtaaaggaagatctctaagatgcactctaacttcagatgcttttataactaatctcattggaatgattttgtcccaaacagtatccttaggaatacctttaccaacacgatgtaaaaactcatgaacatcaccaccatcatctttatatttaggaggtgcaatagataatctaaaatcattaaacattaatcccattaatggaggattatcattgaaatcaaccatatcagcattaaaaccatcagaaacaggtaatgtagaacttagaataccaattaagaaatccatattcaatgtaacaacatcttttctcttgttattaaattcttcgacagtattaaaccaggatttagatatattaactcttagaatatgtaattttttagcacaatcactaacaatcttacggacatcaggatcttcaatttgatcgtattcagaatgaaatgttgatgatgataatccatcaagatatttactcaactccttaaattgttcatctttcaaaattgatttataattaatttttaattgcttcttaaagttttcaaaatgttctaatttcttaagcctagctgcttgttcaagtaaaccaagttgataatacataccaattttagcttctaatggatcatcttcaagatttaatgacattgcatctgatttaaaaatcatttttggtaaatgaataacaccagatggacttgctttatcacgacaaccagttggtccatttttaatagatttaataaatttcttagttaatttagcaaacaaaataatggaatcaaataaagaatgaacaacaaaattggaaggaacagaaatcttaatattggaatcaacaaaggtgagtttgactaatttatgatctttatttgggaattgacaagttaatttcatattgtcaaaattcataactttattgtaaaacaagctatgcttagtttttttaacagataatctaatcaatttatgatgcataaccattgcattattaaatgctgaaccttttaaatcatacatatcaattctcaaatggaacaaagtaggcatgagaaatttaacttgagcttctttcaaatgccatttaatattaaacagtttaaacttagcctttggtgtatctgtctctagctttttggaatattctttaatttgtttatcgtgttctttctttttattaaggtctgggaaatatttgtttctattatatgccattgcatttttgatcaaatagaaggccgagaataaagtaaaatgcgaggtaacactaaagtcaattttgatagtttcaattgaattggtaatttcataaacattggactttaaacaataaacagtggtattaatggtaggaattgataatagtttctctttcggcttgacaccagtaagaggattttgcatatatgatttgatttgtatttcaccaatttgattaaatgcataccaatagtaatcatcatcagaaactttcgatttagttgagaatccagaaagagtcatattatctgaatcattttcactttcaggtttagtatcctttgctcgtactgataatttaatagattcaattcgaaaaacaatacttgaaggtgtataaactttatcgttagcaaacatattttcataatcagattcatccagtaatttttcagctaggcataaataatgattttgaacccaaaactactttaatatctcctaatgataatttgacttcggtgaaccaatctggtaaatctctaaacaacaattgaacattttcctttctatgtttaataggttctctgactaatttatgaggctctttgtgcttaaacatttgcagttgtaatgaattcaatataattgaaagaccattcagaactttaagatctgtcatattcagcatgaaagaaccaaatgaaagtgaagttttcatattcttcaatggaagcatattgcagtctaacttaaataaaatgtctttgattaaagcaaatttcactgaagatttgtttaaattatttctttgatatatcaatgaagtttcaggaatgtcaaatctacaacttaaacttcatatttgttttagaggctgaagtatctaattgcatacccaataatgaaggttgaaagatgaataaatgcatatcacgatcacttttattttcattatctgaacgaagaataatacttggtttttcaattaggacgttaatttgaacagttggtaatgtttctaatactaagttgatatatctagtttttctttccttttcaatatctgttagttctaaagatttcgtattatcacttattatcatgaccttcaccattagcatgaagttcctgttcagcttgcttattttttttgaacaatttcatcaataagatcaattgttcaacacttaaatcaattgaaggattcagcaaatgtaagttgtataattgaaatagtttgcttcaaaataaaatcgtcttgttcttcatgattaaaaataactcttaataaattattcatcatcgtggattccattgtgaataaaagattaggaattgcaataacttcaaaacttttaactttaccagtatattttgtcatttttgtaaaatctaatgcaagtttaaaattggttaatgtaatcaatgattgtaatgggaaagagtcttcaacaaatttcaagctgaaaccaacttgattaggattaattggaccaatattaaatgataatgtatcaagactgaatgaaactaacgcaacatcgtcaagtgaatcatcattcatggtagcaatgaatttattcaattttttagtagaagcaattggaatatcagtgatacgaacagattggaaactaaagttgacatttttcaataatctggcgaaaaaatccatatatgtacattttaactagtgaaatctttttaaaacgtggagctgtttgagagttttcaccatcatctatatcaaattgaaaatcaggattgaaagatttgaaaattttcagaatgtataaaatggaaagatcaacaccgacaattctaaattttggttctaatgaagtaataataccagtatcagggttaattttaaaagtgacagaagttgaaatactttcacaaaacttggagataatattatcagttttatgattataaagataaacattatcaatattgagagatgataaccaagttaactgatcactagcaacttgacttttcaaatatgaaactttaacatcagaagtatttaaatcagtatttcctacaattttcgatgaaacaattgaaagagatgaagatagcagaatagtagtattttcaatattaaatgaaagatgaggtagatatttgaataagaatttagttaatctgtttaatttttcatcttctgagtgaatggatacggatgcattgggatcatatttataatttttcaatttttcaagtaattcaacagtttcataagattcaagagcatttttccttttcattagcatcattgaattgagtaattgacttagcattggaagaagatgaagaagaagtattatcattgttaacttgaaaatctttaacattaatagttatatcagagatggtagttcttacgtaagtcttaactttactaaataaagttaaatgaaactttattctaccaatattaattgaaatttcctttgattttgaaggagtataacttaaaccatgtattgaaaatgtgaaaggattaatgaacgtaaaacttaaaccaaataatctaaaaaggatagatttaaataaataattagcacctaaaccaactaaaccaccaataaacaattgataagatggtatggttagcatgactagtttaagtatagtccaaggaagtagtataaacgctttcaaacaactgaacagaaagttgtataaaaatagaatcatactgaaaagtaattattgatgtaaaacaatgtgtagtcaattaatcagtaaagtataagagtgttatgattggcagactaactgatgaatacaatgattggaattgtacgattagaaaaacttatactatcagtagtatcattataataactatcattcattaacgaaaatgctatcagttgacaacttatatataccaaacaaaaagaaaggaattaaacttgctattgtctttatttccttctccgaaaatacaaggcagtgataaagctaaattgtaatttaaaataataggggaaaggtatactcggaaaattagaatgtttagtagctgaaattgccgaggatactttttttttctcttagtgaggtggaaaattcaaattggaagaaatttatttttttagtaggtgaggtatagtggaaaatgaaaaattttaaatttattatggtagacagttagtaatgctattatcatttctggttttgattttgatttttgattttatcctgattttatattcagatcaagagttattacttaaaccaaaacactttatataagctaattacatcatgcctccaaagaagaataatgttaaaatggatctttcatccttcttggataatttcggagaagctgaagattcttgggcagatgaatttgatccttcaatgttagaaactaataactcatcagttgatgttggtgttagtattgatatcccaaacaaggaacctgaaattcctgatgctccaccttatactgctagaatttcctcattacctgatggtgtcgaagaatttgaaatcaaagatttctttgcaaaaggtttaaaagtttcaaatattgattcagttcttgatgatttttattgtccaagagatcatgatggtaatatgaaacattttgctttcattactttcaattcaagagaattattagttgatgcattagaattaaatcaaaaggcaattaagaacagaccagtcactgttggtgttgctcacccttcaaagaaagaaagagcgccaagaggtaacagacgttatgaagatgataattcattagattggggtgcagcaagaggttccgctactccaagagaattcaacccaagttcattcagaacttccggtccaccaagagagagaagacgtgaagaaccagattttgactggggtgcagcaagaggtactgcaactccaaaggaatttaacccaaattcattcagatcttccggtccaccaagagaaagaagacgtgaagaaccagattttgactggggtgcagcaagaggtactgcaactccaaaggaatttaacccaaattcattcagaagttctggtccaccaagagaaagaaaaactcaacctgctgatgactttaactggggtgcagcaagaggtactgcaactccaaaggaatttaaccctaaattcattcagaagttctggtccaccaagagaaagaaaaactcaacctgctgatgactttaactggggtgcagcaagaggtactgcaactccaaaaggaattcaatcctaactcatttagatcatccggtccaccaaaggagagaaaggctcaaccagctgatgatttcgaatggggtgcaagaggttcattattaaaacaaaaaactgaagaagcacaaaagaaagcagctgcaaagccaaaaactaataataataaatctgaaaatgttgtaacaaacggtccacaaaaatcaatgttcagtgtcttacaaaatgaagaagaagaagatgaagaggaagtgcaagaagaacaaaacaacgatgttgatgaagtcaccaaatctactgcaaaactttcagttgaaggtgatgaatggactgttgtttaattatagtaaacaaagtttcatttttgaatttacttacttgcttgtcactaatattattcaataattctaattgattagattatcctttttcttaccatttttatttcatatttttgttcttttccttttataaacttcattttgttttccattagatcatttttttttccaattgtttcatgttcatattatactatacgattttcattatcatcatactatactttatatttcatttcatgtattattaacaaaaatttgggagtttgggtcattcatattgcatttgctgttttatttgcttatctttttcaattccattaaatttacttattacaattgattttatcattcaaactacaatccaaaattagcaaatattttagaaaagtcttaaagaaatttacaataaacctaacactcaaatacatttcaaatcttaaaattaatacagattctcaaaaaactttacttagataaataatcaaactaacaatctttataatgtatagtagtaatttttgtatatgatataataaacattcatgtccatctagtccatcgatacatgttatcagaagtacttctatcttgatgcataaaaatcgaaccctccccactgtcacgtgaaccacaaaattaaaaaccctgaaattttttttcacaataaaattttttttcatcagtttttcgtcgcttgtagaataagttttggaaaggtagattaatttttaccctactatcataacctttttctcctctaccttcagcaggcctaggctatagttagattcactttaattacatcaagacaaaatgggtagaatgcattcaagcgtacgtttcccttttatttgaaaggaaaatgattcaatatcgtttcctttcgataactaaactgatggtttaatacgcaagaaatatggaccaaattggtagatttaaccattatttgattcccttggtatattcaggaaaacattgtttatgcgtccttcagtttttgatataatatctgaaattattgtctaacaagtgatgttgagaaataattttaaaactgaagtaatatccatagatgcatttgcatattttttcgagtatatttcaatattacttataatgtttgttaaatcaatatacgctgattggtaccagtttgttagtattaggtttaaaggtaataagtttattttgttcttttatactaactctagattttttttctactttttgtttaatatagggtaagggtatgtcatcatcatcccttccatactccagatccgttccatcatggttcaaaggttcatcagaagaaattgttgaccaaattgttaagtacgcaagaaagggtgttactccatctcaaattggtgttcttttaagagattctcacggtgttaaccaaaccaaggttatcactggtaacaaaatcatgagaattttaaaatctaatggtttagctccagaattaccagaagatttatacttcttaattaagaaagccgttgctgtcagaaaacatttagaaagaaacagaaacgataaagattctaaattcagattaattttaatcgaatcaagaattcacagattagctagatactacagaaccgtttccgttttaccaccaacctggaaattcgaatccgcaactgcatctactttagttaactaattgtgtttgtttaatcttttatatatcatacatttaatatttaaaattaataaataagtacatctgtctctacatatatggtaattacctatacgtcgataattaatttaatcgtatcttggtttatagaacttgaatttttcatctttatatttgaaggcaattggcgtaaaatcttggaaatttaaattttcaagtttaacatcgacatcttcattcaatggttccacagttgatgtgtaaaaatcattagtatctgtaaaaattcccaatactatatcatcatttgaaactcgaagtcgtgatttatcatttatttctgtactagcagattttgcctcactattttcaatatcgacttgctgccctatattagaatttgtatttgaatttaaatcagcatcagaatcagaatccgattcatccaatgcaatatttggtatctcaattttatcattaacatttaattcaccattctcatttaaacttttaagtgaatcatccaattttaatccattagttgagttaatcatatttactagacatgtctttaactctgatactgtttgatcagacggtatttccaccatataagttgtagattgtcttttcaatttaagtattagagtatttataattactttcttaggtggcataatgtacttatctgtcccttacacagtgaataacgtacttctttcccaaacattttaatctataaatttcatgacattaattaaaatatgaagaaaaaatacttggtaacgggctcggttgaccttcccaatcaggatccaaaaacatcacaataatttttcttatctctattattattaataaattattatttttattatcagcttattaagatcaacttaatctgatgatgatcatcttctttctttgtaattatttattacttttttctgtaaagtcttttgtatactcatataggcaagtttaaagtataatgtctggcacttttgggggcacaggaactactgttgtctttgcaattgttatcgcagttgcagttgttttagttttaggcatttctgcaataagttcaaaatatacattccgttcctggtatggtatctatgatccaatatctcgttcaacttcaagatattcttatatgacagatatgaatggtgaaacaagaatactacaaccatatgtatattataatcatgaatcattttttatgtttggtaatgaaggcttgttatcaagaagaaataaagctcaaaaaattaatgttttaacaaaaaaacaattaaatgaattgtttcctttgaaaacttataaggattggctaaatggtggaaaagaagaagttcagaacttgagtgttgggaaagtgggttacgctaaagattttgaaactaaagaagttgaaaatgagtttgctactgagactgatataactgaaatgaaaaaacaagacttaacagctaagaatgatagtaagattgagatcatcgttgatagtgatgatgttgatttagaaagaaatcaaccaacttcagtgataaaggagaattttcttgaaagaattatatcaagagtatctggaaggtcaattgttgaagagatgaatgtaccagctgaaacagagaaacactttacttctggatcttgtgctatttgtttagagaatcttgaagatgatgaagatgttagaggtttattatgtggtcatgtttttcatcaagtttgtattgatccatggttaactgaaaggagaggttgttgtccaatatgtaaaaaagatctctatatggaagtttctcaaattgagggacgcacagataataacactcaaaccaatattgatctaaatatgaacaatattataaagttaccaacaggggagccgggctcttcaacccttgattccatatttaacattgattcaaacaacattttttcatttttcctgattttgataataactcgtgttaaagctcaaactttactagcagcactacaatatttacgtcaagattcatattctttgagtaccggtgaagatgaaagttctgatgttgaattacctgctgataatctgtcattaaataaccaattcaatgatcatttcggtgctgcaatttactcacaacagatagctgataaattcaaacaatcactcgtttcggaaagttttgaaaaacctccaatggtagatctagataatttaaatgatcaaatcaaaagaattgttgaacatcatccaagacctttccatcctgatgatttacaaaatttagattatgaagcttggaaagaaactaaaaagatgaacatcttccctaaaaatctttactttaagtttttggatatatcagcaatacaattatactactccaatattgtcaaaatatatgaaaggagacgtaataatcgtttaaatcaataaaccagcttaactttaaattattacttatcacttttttttgctttatttctaatttttccaaacttttctttgactctttttacttcttttaaatacactcaattttaccctttttcatttttatgctctatgtatacaaaatcattaatctgtacttacaatgatacaatttaaaaattaaacattttatattctatttttcaattaagtttttcaaatctggaatatcatcttcatcagaacattctaaccatatattacaaccaacttcctttttaaacaattcaacagatccggcatacaacatttttatatcacccttagcagtatctggtctccaataaattccaactaatggacttgtatatctaccatcaggttttgtatatccataattcatcagtacatagcatggagtgttatctggtaattcatcaattaattcatcaaaagctgtaagatttaatgattcatccaaattaatcgtttgttcatttttattaattttgtaaatttgtgtaggtattgttgttgatgattgtttgattggagttaatcgaaattttcttaaactttgtttagcttcagttggaattgtgcaaatagattgtgacattattatcaaatggtttgtatgagacaataaagaagaagagttatggtactaaattgtatacagcatttcggaagagacagacgtacaaaactatactgcgcgtgggttaactatgcaggttaattaattccagttgtcaggtgcatgatacggacccaattttccattaatataaaagatatagagttataaaaacatattaggcaacatcaatcatctaaaccagctagttctgcttcttcatcagcagttgctctttgtttcaatactaaatcatgacccataattcttttataaatatctttaacatcatcagttgttgattcgaaatgtgatgaaggatcataagatttagaaataaaaatattatcagattttccatcacttaaaggttcataaatttctgcaatacccattaaaatatctttagttggaccaattattttgaaagcaggttccaattctaaatgaggtttatcagtttcaataattgttgaaataattgctaaataatgattctttgaacaaacattatgagcacttgataaaactgcaatataaatatcatttttacgattaacttgattttgtggaattataatttgtgcagaatctgcatcatttgtatttggaattggatgatctaatatacacattgctcttataaccttttgacctgttgctttaactttttcaggaaaataagttggatctgcaataacaattggagcatttgctataccttcctttgttttaacacctttaaatttattttcatcatcatagtaaatttcttcaataggagtatctaacataaatgtaccaccataaattgctgataatcttgcaaaaccttgaggtaattcacctaaaccatataatggataaatataaggagatttaccatatcttgcaacagatgtaacatataacataattctatcataagtatctcttgcaggttcatttaagtaatcatcatttggatgtaatgccattgcatgacctatgaaatcttttgtacctctctctaaaccatatttataataaatttcatccattgtattcttatctaaatcaattccatggtgtgtctttgaatctttttcatcataatttgcaataaattcaagaaaatttttcattcttctcttttcaaaaaatcccattaatggagaagagatagcttccatttgagttgatggaactttagcaattttaccacctctataaacaaatgagccagaaatttgtttaaattccatatatctagtaacatcagtatgaactaaaatattagttaattcaccatttgacattaaaaatttaggaattaaatcaacacaccaatctctatctttaccaaattgatcttcatattgtttctttggtttgaatttttcatataattgagttaaatttaatgaagcactctcaccaccataatagttttgacgatcaatgtgtaacacttttttaccttcaattgagaggataccggataaaatacactcggttaatccagttcctaaaactataacatcataattctcatccattgtactaatagaagttgtttaataagagataacgggtataaacgaaagaaaagaaacaacgcccttactgttaatggatgtagcatgattgtaaaattaaacagagtataaaattaaaaatagtttagttttggttatatcgcggtttattatagtacagaacttcgacggactattatgtagaggtttactatttacaaatttataaagtaatatttttaggatctaatgataagtgcttgaatactctagtaccaccaccaccaagataatccccaacaacttgaccagaacctctcatttgatagtaataagcaaaccaaaccttcaagtccaacaggacctcttagaatgaattttatttgttgaaataccaacttctgtaccaaaaccgtatctaaaaccatcagcaaatctagttgaacagttccaataaacacctgatgaatcaatcccctttaaaaatctatctgcagtatctttattttctgttatgatagcatcagtatgtttagaagaatgtgaattaatatgaataattgcatcattaacatcatgcacttgtttaaccgcaagttctaatgataaaaattctttagaaaaatcatcatcagttgcttcaactattaattcttggtatttttcctttatttgagaatctaatgtagaaaggaaacttggttcaatatgtaattttatcttttcgtttaataatgatgttagtattgttgattttacttcattatcaagattttcatcgataagtatagtttcaactgcattacaaccagcaggataattggtctttgcatctatcacaattttaattgccttttcaatatctaaatctttatctaaataaatggaacaaataccatcagcatgaccaagaactggaattttagtattttcttttatatttttaactaattcatttgaacctcttggaatgactaaatcaatatatttatcttgactcaataaatcagaaacttcacctcttgttaaaattaattgtatactattatttggaactttagttttatttaataatatatcattaataacatcagaaatttctttaaaagtatttaaactttctttaccaccttttaaaatagcagcattacctgatttgattgctaaagcagtgatattagcgatgaacttcaggtctactttcaaagatgattaataaaactccaacaggacaatgttaatctatataaatttaaaccatcatctaattgagttgctaaagttattttattgagaggatcatctaaattagcgacatcaataataccatcaagcattgaatcaaatttaccattaattgagagatccaatcttttaattaatgaagatgataaattattatcaatggctgtttgcatatcaattttatttgcagataaaattttatcctttgcttgtaatagaccatctctgatcatatgtaaagcatgagaacgttcatcatttgataaagttttaagaactgtagatgctaaatgtgcattccttgcaatttcttcagccattatgatttatttgatgatatggtattataatactaccctaaatggttccaatttaattcagtgcaaatttcagagtcgatattaaatcaaactgtgaatgtgactcactgaaaaactgactaagttttcataaaaaaaaaaaaataaattacataagcgccacattcgcggtttcccatttaggccactttcccaaagcggtattaattgatatatgggccagatttacataatatttttcgtttttttgctgctaatctcatttcggactattttatgcttatctgaaatttattttcgggattgactggaaaattttatcttttcaattgatgattataaattacactcaatttcccatttcatttaattaagttttgccttcacattcttctttttactttcacctctttcttctgttattcgcttactattctttatatcctacttcctttatcagaagaataatcgctcgctcaattactctaagtactgttaaattaaattaaaaatgcaattctcaactgttttcatctcattagctgcaatctctgctgttcaagcagcttcaaatgattctatcaactccacttctgtttcaactgcaggtgctccagcaactgctcttggttcagttgctttaggtgctgctgctgctgctgcttttgctttattataagctaaattataacacatttactataatatacaaaaaatactatttttcattacaactttattcttttactgattaattaattaatttcaagtatattatattttttttattctctcgattatttacatataatataactaaatatctctgttcacttagcctcttattgtataatttatcttttataactataattaatttaaaaaaaaaagctgcggcaaatataaaatattttttctctcttatcgatggcacactataataatgtgggcttatcaaaaaagtgtatattttataaaatcacggaacaataaaatttttttcgataagttttttacgaactatattattggttatatgaaacatagcaagcatagatctgtacataaatgtctgttgcatatattagcatagtaacaccatcaacgacacctcccataaatcatcttctgtgaaatccaggaagacttttccgctgttcccgattaacttttcacttagaggcgataggccagacctttttttaagcagggctagaccgcctagaactcgaattttctagaaaatttaatttttttactcttttcggatcatttggtattacgtaacaatacacattacgtaatatatatcacacagtttacacacacttacaattcatcctttgggataccattaacaccaactaattcagtttcaaagattaatgtagcatcaggtggaataacgccaccagcacctcttttaccataagctaattctgatggaataattaatttacgtttttcaccaacacacatttctaataaaccttcatcccaacctttaataacttgtccaactccaagtttaaatttaataggttggtgtctacctaatgatgaatcaaaaactgtaccatcctctaatgaacctgtataatgaactgaaatcatatcaccaatttgtgtacgatatttacaattttcaatttctttattaacaattatttgtaaatgatcttgtttatcctctgttacatcaacaatatcaattgcattggtaattgcattaaatgcaataaaactacttaagattgaactaagtttcattatatttaaagaaggagactaattgaaatggacacgtagaatcaataatttgtaatctgttacttaatactcatacaatttttgtataacgcgagattttaaaatcctgttaaatctcaaggttacttgatttcataatgtaatttcttcaaagttatataactttctcttaacctatacaaaatgaacacagctgatagtctatcaaatgatgcaattcttggtttagatattgattctaatattaatacaaattatccaggtattgatatcatttcaaataataataataattcatcaaacactttacagacgcgtaaacgtaaaggtgatagattaacatcaattgaattattaagtggtagaggtataccaaaattacaagaagagtttaaaaaattcaaatttatatcaaaaagagataatcataataagaataaacataaattattaagatcaaataatgttaattatggagaatctcatcattatgagaatttatcaagaattttacaagtgtatcaaagttggggtcatcaattaacacctcatttgaaatttgatagatttattgataatttatcaagaagtattgaagatactgatacaaaacattggttaagggatcaaattcgtgaagaaatgagattaaaaatggagaaagagaataatattgatcaagctccaataaatacatcaaatatatcaaatacattattacctgtatccaatgccccaatagagaattttcaacaagaggaagataattggtcagaattatttggaggggaaccaaatactactacaaatggtatacccactcaaaacaacaccaacaccaacaccaataccaatatcaataataatactagtgccaatgtcactgctaacgccgatattgatgtcgatattgatataacacaatataagcaaacatcattattttctgttgttcaacatacatcatcacaacaattaccatctgaagatataccagaagatgtgctgaacgaagataatgaaaatgatgcatatgatgcattgaatgatgtagatgatggattacaagatattctaagtgatgatgaatataagggtaataataatgataaagttgatgaatcacaagttatgtttagtcaatatttagcttcatgattctcaattacaatcacaaccacaatcacaaatacaggaagaatctcaaaatatatcaactacggttgaacaaaatacatccccagtaccaccatcatcaccacaaccacccttcagatgatgagttctcagatgatgatgctgtatttgcagcaatttaatagtaataactgtatatctagtatccattagactgccgttgtacattatgtaaagatgtaaaatttataattttttttatgtaatataatggaggctcaactttttaataaaaaatagctgtattacttttacttaattattttcatacaaagtttctcttttcaaactcaccaacaacaactacttgttctctttatatttgactttatttgttacattatcagcaagtattgcatatccatacaacacaaagagtgtatatataatcaaggcagatgtggtttactagtattctacattatacatgctatattctatgccttgtcccatgatatctgtttaaaacatgttcaaaatccacattttggcaataattgccatcaattgaagtttattagttcactaatcgataataattcaaataaaagttaaggagagatacttatgcaaaacattgcgtcgatgaggctataattttttttactatgcatactaaacttttctcgaattctttgaaatgaatttctaaaacatgaaaacaagagagcttcttaatatataatgcttaggtagaggttatagattttagagatcttgggaaatttacaattcaataaaaatctatttcaattattactttttttaaaatagatcaaatggtagcaacacgtagaggatcacctgctgtttcaaccacaagatttacacgcagaactcgttttacctctgcaattggtgcagatgaagatgaaaatgatgatgaattcacaaatgaaaatgaaaatgaattagatgatgcggaaaataacgatgaaccatctgaagagtatgaagaagatattcatgatcgtgatgttaaatcagaaaatggtaaaggaaataatgacgaacataccgaacatcaagaagatcacggcgaagatgaagacgaagatgcagatatcagaccccatagaacgcgtagacacaaaaatattaattataacgaagatagttacttaaaagctttagatgaagaagttaaggaagaagaggaggaagctaaagcatcacgcctttcatcgtctactaataattataaaaatgatggagatgatgaagatgattatggtgatcaatatgcacatagcaataccaatggaagaagaagtttgagacgtaagagatcacataaacatgaagacgatgatgattatgattttaatggtgatgcaattgatacaaaaattgatgatgatgaatttgtggcatcagatggagactgatgatgattttatcggtaaaagaaataaaagaaagacaaagacaaagacaaaataatttcattgttaatgatgattatgaagttgatgaaaatgagttagagtatgaaaactctagaaaatcaagaagatccaccagaaattctagaacaagaagtcaccaatataatatgagaagtactagatctcgtaattcaagatggaatgaattattaaaagaaaatgaaaatccagatagccccgtcacagttagaagatgaattgaaagatcttcaaaatgattcaccactgaattccccaaagagaaatttaagaaatcgtaaagatgttaactacaaattacctcctccatatttatccgaggctcaattagaagaattggaaaataacacacagacagaaatcaagtccgagaaaaggtcgttctggtagatatggtggttctactagtaatgtttcaagcattcgcagattatattcaactgttggtccttttggtggaagtgacgttcattcattatttcaatcaaattccattccaagtggtttagctgtattggcaaacgcagaatcaagcgattcagatgatgaaaatgatcttatcaaaccaacagatccaaatgatactaatatcatcacaactgcaactaaatcctaattcaactaataaaaagaaaaattctttggcagataccgatcctttaggtatagacacgaatattgatttctcggtagttggatggtctaaataattacatcaatcagttaaaagaaatggttacactaccattattataccctgaagtatattccaaattccatataacaccaccaagaggtgttttatttcacggtcctccaggtacaggtaaaacattaatggcaagagcattgtcagcatcttgttcatcacaaaataaaaaaattacatttttcatgcgtaaaggtgctgattgtttatctaaatgggttggtgaagctgaacgtcacttgagacttttatttgaagaggcaaaacaacatcaaccttcaattatattttttgatgaaattgatggtttagcacctgttagatcttctaaacaagaacaaattcatgcatcaattgtttcaacattattagcattaatggatggtatggataatagaggtcaagttattataattggtgcaactaatagaccagattcaattgatcctgcattacgtcgtcccggtagatttgatagagaattttatttcccattacctgacttaaatgcacgtaaagaaattttaaatattcatatgagaaaatgggaagataaattaaatgacgaatttataactgagttagctaaactaactaaaggttatggtggtgctgatctacgtgcattatgtacagaatctgccttaaatagtattccaaagaacttatccacaaatatatgaaagtaatgaaaagttgaaaataaacctaacgaaaattaagccaattgccagtgattttaccaaagctttacaaaaaattataccaagtagtgcaagatcagttaataatatatttgaaccactaccagattctgtcaaaccattattacataaccaatttcttgaaatattggataaattaactagtttattacccaatgagaaagaacttacactattagaggagtctaaatatgaaacattgaataataattttcaatcccaacagattatcaagaattttgattcaatgagaatatataaaccaagatttggtatttttggatctaaaactcaaggtttaacatatctaagcaactcagttttgaataaattagaaggtttcacagttcaaatattagatttaggtaagatatttagtgattcgagtataagtgttgaaaatgtatgtattcagttattttcagagttgaaaagacataaaccaagtattttattcattcccgatacttttgggtttttatcaacaatcaatgaatcattaaaagccacaattagatatttgattagaaatattaataacaatgataaagtattgatttattgtgaatttgaatctaacaaaacagaacaattacaagactatttggacgaaattgaagaagtttttggaattactgaagataatctcataatggtcaatgatccaactctacaagagagggatgaatttttccaaaatttttggaaatcaatttattttacaccaaatgaatataatgatatacaaattagacctaaacgtaaagaaatcacattagaagttgttaaagatacgaatgagaatgatgaattgaaggataaattgaatagagataaaatagttaaaaccgaaagagaactcgctaagaacgatatgagattaaagaacagtttgaaagttaaattatcaggtctattagatatttttaaggtacgttacaaaagattcaaaaaacctattattgatgattccttattaatacatttgtttgaaacagatggtacaaatgtggaaagtaattatcaaatcaaggatgaccaaattttagaaatttcaacaaataaattatattataatatggatttagatgttattgaagaaagattatggaatggatactatagtgaaccaaaacaatttttacatgatttaagtttaatattgaaagatgctaatttgtcaaatgaaaaggatagaatcttaaaagctaatgaaatgtatgcacatgcagttgttggtgttgaagaaattgaagttcaattcccattattagctaaagaatggaaagaagtcagtaaaagagaaaaacgaagaaaaattgaatatttagaaaaaagtagggaattaaaggctttagaagatgtaaatgctgctaacatgacaacgacaccacctgtagctgaacttgaaggtaatcaagtcaatggagatgttattaatggagatgaaaagataattgaagaagataccactgatgttccagcagaggaaactgataatgttgaacaagttcaagcacaatcacaaattcaacctggccaaaaatctaatttaaatggtgatattaaagatattaatgggaattagggttgaaccagttgtattgaatgaaccagtagagaagattgaagtggaattacaagttgagaatttgaaagaaaatgacgaaatcaatactgatgttgcaaatgtcgaaaaggaacaggaagaagagtttgttattgaacctcaacataatatagttaatgttgataaagtcaaagagttggagaatttattacttaagaaaactgaaggtttccatgttagtaaattagaaagaatcaatagcaaattatgcaatattgtatggaaccatcgtttatcccttgataaagttgaattgatatcagaattagagaaattcatattgaacagtctttgaatgttttgtattgtatgtattactaagtcatataagtttaatatggttacaataaaactcgttatagtgtagaatcgatcttgatcctaaatttcgagacaagctcgataatttttttcaaaaaatatttttacccttaaaattgttctttatcaatcgactgcccaatgtctaaatataaggagattaaagaaaaggaacaattacagttacaattacaagctaggattcacacaacttgatcaaactgttctatcatggctaactccaactgataaatcaacagaaacttcatcaaaaaagcaagatatttcaatatcaactgaattcggtaatttacaagtagtgcccggaggtgcaggaattgatttagaagataccaaagatggtgaatcatctaatagttccctaccaagagtaacgattaatgattttccttgaaggtacaaatactaagaagagatctaaaaaggatgagaacttgagtagaatcaagaaacctaacaataccactactaatggaacatcagcgtcagcgtctctaagagcattaagtaacaaattacgtaatgaccgtcgaaataaaactgaacagagagcaccgccacaatcacaacaacaaagaggcaaataccagccgcaaaatgataaaaataaatcaaaattcgggaatagcgagatttctgatgataattccgaagattccgataatgaaatttttgagagaagagccaagaagaagcttagtggtaaaagaccgttttaacaatcaaatcttatagattatgtccttaattatagttattcaattgacatgaatcccttagctttagcagagtttttttcacttcatgtaggactgatttattattaatgaaatatattctaatctatggtacataattataaatttttatagaaaattgtttaaatacaaattaggaaaacaaaataaattaaaacaaaataagaagtaaaaaagaacctttaaccttaacccaaaaatgcaaacaaaactgtaaattattattaaatttgatctcatgttaataaacttgatattttgatacttttctctggtttattaacattatcctcaagtatatcacctttactacatcttttagtctttggactattaatttcagtaaatgtagctgctgaactagtacttgatttagtactactttttccattcgattcttccgataatttattatcttccttactttcaaatttttcattctctttcccatcttcagttttattcatctttataagttccttttcttcactaacagcagttttcaatgatgagcttaatggtatatttagtggaatacttgaaattccaggtatcgttgcaatcgatggtaatctaccattgccgttaccatttacatcattttcattttcattaattgttattatactacttaaattatttgagattaatgatgtacttggtctcataaaactacttgtcgatgcaattgatgaaatggaatttgatgccattgaaaatatcgaattattagctgatattgaattatttgttgatggttgatgtaaatcaaatattgatggtctaaattgtccaacaattgatgaattcattgaagaatttcttgatgataaatgaaatctattactatttgatatattagatgaaatactatcaagatgcgatcttttcgccgtacttattgatgaatgacttgaaattgatgatagtgatggtaatttattattgattggagtttgtgattgttgttgttgtaatggtaaaattggtggtgttttaacacgttctggtgtaattgttgaattaggtgctgagctacatggatcaataaaaactgatggatatctttgtctagattcttgaaaaatacatttgatttagaagagacagggtgataatctattaatcggagaaaatgatcttgacggtggaacattaagtgcttttatgaggtgatttttcttgattaaatggatttcttaatgatttaggagttggagctctgaaaacttgattatcttcaactttaggttcaataactggttcactttctgttttcttttcaagtatatcttcttctctgtcgttattcttcttcttttcttgtttttcttctacttctccatctccttcatcatcatcttcttcttcttcttcttcttcttcttcttcttcttctttatcaaattcattacttctacttctttttctattaggaaatactggtttgatatcagtgacataaacaggattatatgaaacaggtttattatttttattgggtaagttatattcaatcgcattatttataccattgttttctataccacttgaagtaaccgaatttgataaatcatcatgaatttcattattattattattattgttaatattattatcattaatattgttattattattgatattattgttattgttaatattattattattattatgaacatcacctgaacttcttctagagtttgcccttcttcgtatcatatataaagtttcttgacaatcttttctaaatttatcagttgcatgtctaaattcccaaattgaatgatttggttcatctaagtgtttattatcactattgttattactattgttactattattattttcgcaaactttagtgaaatccatacatatggagttgacgaacaaaagaggcaacattaccatgtttgaaatattttgttaagcaagcttgcaaattcagtacctggtaataaagcaaatgtaacatcatcattttgatataatctactccaccaaataagatgtgatagtgatggatcatgaagcattgaaaataatttcattacaaatgctgaaacttttttacttttcgatttactatttgagtttgatgatttcctacttgatctttcattattcattgaagatatctgttgggtatttgcattaatattattattcatgatattattattattaatagtagtagtactattggggttgagattattattatattgaatatacggattatgatgttgactttgatttggatcttgttgaaatggagggaagttgctgttgatattgttgaatttgttgcacttgttgatattgttgtaattgatgttgattttgtaacatgtcattagtatattgaccattagaattaatgttatgcatatttctaatatcattaggtggtaattgttgtggaggttgatgatgatgatgatgatgaggttgctgtggaatttgcttgctgcttgttgttggtgatggtgatattgttgcatttgaatttgatacctttgcatttgttgcatttgataatgataatcatttggtatttgatgatcataaaatccattaggacctgtaacggcagcagctgataatatttgaggtataccttgagaattcatcattggaccttgttgtatataaccttgattagcgatatataattgttgttgaaccttttggtcaatgttattcagattattgagattactactagactgtagaggtattagaagctgcagataaaggcggttgttgttgttgttgttgttgttgctgtgttgttgctgcagtggcggtggcggttggtatgatgatgggatattagtaccgttattaaacccatttagagtaattatattatcaatggggatactattaccagaaggatgattgttattcatattgatagtaaactagaatagtataatcagggattgattaagatatattgtatatagcacagtgtacagtatattaaatagggataaaaatagatttaatgtggataaaatatgggtaaaattaatgattaaaattaaaatagcaaacggtatacaactgtaatcaaatctaggaaaggcccaacaataagaagaacaaaggcagaggcaaagaaaacagaaaagtgagaaaacaagcaatttcaagagaagtcactttattgacaagaaaaaaatggaaacttcactcgtttcttttttttccttggattgcttcttttcaaatctattttctccgttttattgtttatttttactatatttactatgtttacttattggattgttattattattattattattattatttatcatttaaattatatacgtatttagtactaaaaatatctgtaatatgcactaaaatttttcttcacgaactagtaatcttccacttaacatatcattcactgcagataatttatcccaatgaacactaatacccctacgacgtgcaacatcagtatctgccttccaaacttcatcaatatccttaaaataaactttagatccttgcattgcacataaaactgcattattattaacatctgaaacttgaatcttcttaccatgtttatagaaatattttaaattcttttcagcttcatagaaaccttcaacttcaccttcacgttcacatcctttatttaatctttgtatcttttccatcatttggaaattattctcttcaataaacttcacatgccttaattgcaaatctagcactatacattctatccatactacttggtatcttaccttgttgaacatgtcctggaattgctgtacgactctcaaacttaccttgtgcattctcttcaataatatcagcaattaattctgttgtataaactttactagccttctcatttctaatgaaaatcttaccagatctttgatcacctttatcatttgcaaaagttttctctaataattctaaatcttcttcaatactatttaatgaaattttattctctggggtataaactgctaatgcacctgtaacaagtccacaatatgatgcaatataaccacaattaccaccttgaacttcaatgaacaaaaactctacgtcttgatgatgatgcactttgtttaactgcatcacaataattaactaaaatatttaaacatgtatctgatcctaatgaatattctgtacctggaacattatttgaaactgtacttggtaaacaaacaattggtatattgaaaattggatatttttctcttgcatcctttaattcctttaatgattcatatgcttcaaatcctccaataataattaaaccatcaagttttttattttgtaaatgaaatgaaacggatccaaaatcctctgatggtaatgaacgattaggtacctaaaactgatccacctaaattatgccattcttcaacatcattccaacttaattctttaattgatccatgtctaattaatccactgaaaaccattttcgataccatatgctttatgatttttagataataagtataaaacaattgctctagttgcacaatttaatgatgcagttggtgcaccaacatgaataataccaatattcaaacgtttttcttctggtaaaaatttactattatcatcatctcttgaaattgaaacaaaattatcataatattctttaaatgttgaatcacgatatttaatggcttcttcgaatttcttttccttaatacattgagcaatatatttagttttagaaactgcatcaactaatggaactctaacaattctattattttggatagcaatcattggtgatggtgttgttggtgtattctctaaaactgcattaattcgcttcaacaccttgtaatgttgataaacatctatcaattgcaactgctgtaccacctctttgaacatgtcctaatgtagtaattcttgtatctaaaccaatttcaactaaacaatctttaacttcttcagatgtgattttatttaattcattatcaattgcaccttctgcaacaataactgttgtctttcttctacccttttctttatgtcttttacaaatttctttcaactcatccttccatgttaaactatttggcggaatttctggtaagaaggaataatctgcaccacaacaaatacctgccattaatgctaaccaaccacaatttctacccataacttcaacaacgaaagctcttgaatgtgatgcagcagttgaatcaatataatcaaccatttcacaaattctttccaatgatgaaaatgctccaatagttgtatcagttaatgacatatcattatcaattgatccaactaaaccaacaattgttaagtttctataattttcacatgcttcctttgttaaaatatttttttcaattaattcttcaactaatgatggccattcacttctaaataaatctgcacctgttaatgaaccatcaccaccacatacaactaatgcatcaataccttttaaaatcatattctttgcggctaataatctaccttcacgttccttaaattccatacatcttgcagtaccaattaatgtaccaccaagtgataaccaacctctaacatcaccccattctaatttttttaataaatcaccacctttaactaaacctgaataaccttcataacaaccgaaaacttcacaattaagataaatacctgctctaacaacactacgaacaactgcacacataccttgagcgtcaccacctgatgttaaaactgcaattcttttcttctttgttgttgctgttgatgcagatgaaatattcaatccttgctttgctaactttagtgcttcaactttatcaacactaataaaataatcatctcttgaattaattgtaatgatttcatcttgaatatagacatgattagtaaaaccaattaaatttccaacaggatcttcaatgaaaaatgagacaattttagattcttgaggtgatggttttataagtttgatattattcttttcagcaattgacttaacaatatctagtgaataagttaacataacaaatttaccaggtaattctaaatttttgttaacatcatgagatactaatctaattttcaatacaatacttttatttaatttaccctttgcatcaattaactccggatgtaaatattcaattgtttcttggaaaggaatgatatttgatttacctctagcattaccatcagtagttctactaattggaaaaacttccatccaacattctttacgagaatctgttgaaataccaaaattatcagcttcagttatattctcccttgaaaatgtttgaatgattgtaaatccaaatttcttgtaaaattcaattaatgcaatataatctgcacttttcgtaactgtaaaggatgcatatgtaactatccccaactaaatctttattctttttaatagactcgattgcgcccattctgtatgataattaattaactcaaagagtaaaagagacgtatagattaaagtaaattaagtaaattaatcaattttattttttattacatcacttaatggcagtgttcgcgattcttataaaaaatagttcaccaaaaacaatgcactagtgggatcacgatattccgggtggttttcttccagtgagctgttcattatgatgcgttaactcgtcagatttttagactctctgaatagaaaagatatcatcattttgaatcaaatctatgaagtttttttttataataactataaagggaataaaagtaacgttaagaagtttatgaaagggtaaattatagtgaaatagtttgtgacgttgttcagacaatgaacttagtccttaccgaataagaactgataaatttgttcaaaccatctattaactctatttttctttttataaactaatctttgcttttcaagcattctttcatgaacttcaatttcttcaagacctgtaactaaatcaactgttaatggatctgatttatatttagttctcttaattaatttccaaacaatgaaaatgaaaatatcaacaaaacacatcatataagaaaatagaaatgtatctctatcccaattacctggtaagaaaactgtataaccttgtaaccaaaccattataaatacaacaacaagtgtgattatacaagcccaaggttgaaaccatgatttgaaagtgaattttgatctatcaattccttgctttaaaacggctcttctaaaatgtaaataagtgaataaaataacacaataattaattaattgagaagcagtaattaaattaataatccaatttaaaacagtatttgcattttcattcaattgtaaaaatccaagacaaccccaacataatgataacaaaactgcaaaaattggaacaccttgtttattacaataactgaaaacttttggagctctaccttgaattgataaaccatagagctgttcttgaagaacaaaaagtatatgagttacctgcactaaaacatgaagttaataacattgcatttaaaatatgaggtaaaacttttatgcccatattatacattgcaattgtataagggagatgaacctgcacctggcctaccatcagcaattgcatttaataataatggatctcttgcgttacataaaataccaacacataaagcaccaccaataaagaaagttgttaatctaaagaaaacacctttaaaagcatttggtaaaactttacgtggattaatacattcaccagctgccatacttaaatattcaggacctgcaatcatataagaaggcattaataagacaagctaagaaaccttgaaatttacctaatgagcctaaatgataatattctaacataacaggagtacttttccaatttgtaaaaccaaaagcatgatgttcaggattaccaccaaccattgtaataaaagtgaaaaacatcaaaccaattgccaataaaactttaccaatacataaccaaaattctgcttcaccataaaatctaacagcagcaacattaataaaaaaataagcaactaattcacaagctaaaggtatagcggcagaataaccatcagtccaaaaatgaatcaatgtattaaataaagttaattcgaatggaattaaagcacattctaaaacccaaaaattccaacttgccataactccaaaagcttcatcaacaaatctttcagcaaatatacaaaatggagcacctttaataggtaaataacaaaccatttcagcacaacaacatgtaatttccaaaattggtaaacaccatattgagaatcctaataataatgataaacaaccaccagttttcaaagctgtaccaatattaacgaaaagagagacaccaattgtaccaccaattgcaattaattcaatttgcctacgttttaattttctatgagtatgaccttgttcatattgtaaatattttattgtaacagaatttaagtcagtatttttagttgaaatatctgaatcttcacttaaatataacggctcagcagttgttttctccaaatcaatatcaagattttgaccatctttattatttttattactaaactctaaatcttcattagtaaaatcctcattatcaaaacaatcagcatattctaatataccagcacttgaagcggtgataatgtgatcatcaccatttgtggttttcttttcatgtctaaaagtttcagcttgaacatttaaacaatattcatcagcggcttgatcaggcacaataggtgggattggcacgaacgtttcctttaaaagttttaacactgggttcattgtgatataagagataatagatcaaaaaggaaagaaagaagaaagaaatgatacaataattactgaaaagtggcaaatggggggtcattttaagtaaaaaatagtatttcagaacataattaattaatcaatcaaaagtttaaaaaccctatataaagtataaactgttatataaatcatgcaaaaaaatcaaagctgagccatcaatccaataattaaaaattttaattaaatagttgcggggcaatcaatataatacccttcggctcatcggaactttatcagtgacgaaatcttgaaaggaagccgagtttcctccgtccatgggttaatcccgctgttttcccattaactgattgatcatccgatgggacttctccctctaattgtaattctgttacggagtccgtggttatactattattatcttcagtagggaccctgttagttagaatttcaacacttggtacagttgctgaatttttatctagagatggaattgccggcagcggttgggcttgagattgggcttgagattgggcttgagattgggcttgagattgggcttgagattgagattgagattgagattgagattgggcctgagattgagattgagattcagttgtatttgttgtaattactgatgttgaactcaatgatgattttgattgagattgagattgagatttaggtttaacttcagatttaatatcagacttcatttctttaatttcatcatctttatgatcatattgttttaaaagtttaagtaattgtaatacatgtaatgatcttaacagtaatttattatcattgattaatgctcccatttcaacaaataattgcagtacaatctctgaaaaatgtgtattaaatactgtatcatccgtcaacatctctctaaatgttggccattcacgttttttatgtttataatctttattatctttattatcactcttttctttacttttattaccttgacccatttgaaatttacttgtaaatattccattattagttacattctcttcattatcactttcatcacttgtataataccctaaatcatctaaaatacctgttgtaaatgcaatatcatcactattattactactatcactatcatattcttcggaaatagtacgattcagtggattaatatgatcattattaacattatcagttggtatctctaatggatcaatatcttcattaattgttgttttagttgtatttttgttattattattattactattattattattactattatgatgatttgattcaatatttgttaatttctcatttaatttattttcattattctcctcaattattatatcactaccaattgtactaccggaatctcttctgctattattggctgcttcaactaataatttccaatccagtgcaacatcatcactacctgtagtatctaatatattataaattgcatcattaataccttcttcactattattctctaattttagtactaaatatgattttaatttagattcaataatacctaatacaacaaacattaattctaatatcatatcatataataatggtatactcaattgtttactacaaattaatgtgccaactcctgttgggaataatttccaatttgctccaatttgtccactatacatatattcaacaattgccctaactgttgtcttggaatatggtaaatataatactctcggtaatcttaatgaattaaatttattactattattgttattattaatgttcttcattccttcatttgaatcattccctccttcattatcataaatataatcatattcatcccctctttctccattggcatatcttcttttcaacatatcaataacatcctcattaagtaattcatcaatactctttccacgtttttgttcattgttattgcttattatcattattagacatttcttcctccttcatctcttcaccattaggtaataccttgggcattggtaattgatcaggtatttcattcgaattcaaacatttcagtaacgcttcaggtagattaatttcatcacttactacaccttcaccattcttattaacttcattcttcccacttacatttgatgttgaaaataatgttgaataatcaccagatgttctctcttttgacatttgatattcattattgatcattttggataaattagaagatatggaattatatgaattagtagatgaagaagtgtgtgatgttcttgacaagtgttgatcctctacgtgctggtaaagaatttgtcataggcatacctgttgatcctctacgtgatggtgaaacattagaatttcttcttgatatagggaaatatgaaatagaattatgacgtgaattagtgttatgatttaaactatatgaattattccgagtttttgataatgatattgaaactctgtttaatgttgcattaggaaacagtgtattaccatttatcgaattatttctggaattatttctggaattaacagttgagttacttcttgaaattctgtctggtgatagatcatctctgtatctttctttaaatggacttctaaatgatggtgtactattattattactcgttaaattattattactattattagtatttctactatttcgaataatttcatctgtactacttgctgttttcttgaatgattgagaatgaaaaattgttggtatccctgatttatgaatcatattttgtccttgaattatatgaggaatattcatcatttgattcatttgatccatatgtgctacctcttgaagataaatcaaatgatctacattcgatatatgattttgcatatgcatctgcaaataattcatcaaatccaacaccccaccttcgacgacataatgtcaatggaactgaaattattgtaccatcactacaaacaatatcaaaatctgaaaatgatgtatttctttcaaatgcattcttaccaattgcaattgcatatgatggtaatacacttctaatagaattaatttgcatttgttgtgcgacacgatgtgaatatgctgcgaatcctcccatttgatcattaatattagtattgtttattgagcttgtcatgaaatttttattgaatattgaatttgatgtagctgatgtaattgaatctgatcttttccttgtttcgttactatgagttgatgaaatatcattcattctctgtgatgaatgaatactacttgttccaggtgatattaatcttgctttattaggatttgcatttactcctggtgatttactaaaaaaattggtgaatggtaatgaaagtataactaagttgttaaagaaattaacacttccactacttttattcatatccattgatcctagaaatgcaattttatgatgcgattcccaaacaaatccttttgataatctatgactgtatattttatgcatacatgatatttgaagttttgtccatgcattagttttaatattaaaaatgaaagaggatatctttttttcagttcctagaaatccggtcacaataatattatcaccaaatgtacctaaggttgggtattccatagtagatagatttgttatatcataatcacaatgatgtggtaatctaataccgttagaactttcgttgaatatgattaatggttcatacttgttgacatctggggatctttcaaacagaacaattttagtttggttggaagatgagcatgttgtactatatacatcattcaatgattttcttatctttaatgggtgtcttttaggtaattttggagtctgagaacttttctgattattgttgttttcggtatgtgtttggctttcattttcatcatcttcaaaaattaaactaaaatctcgatattcgataaaattagtactaatcataactcccttttcattattaacagcactcgtactctcaacagattgtacataatcattattttcatccaatccaccgatgactatcatacctggatgaattaaatttttatcaaacatttctaaattaggcaatattgaaacaacatgatcaaatctacgtataattgtctcatttccttcggggtataagcatgtccatttcctttcaattatatcaaatttccaaacatcattcaatactttgagtttattgttttcatcaaaggccaatccacatccaatatatacataattatcataaataaccattccatgaaacattctaggacgtggatttgagagtttctcatcattggttttattttgcctataatgtgtccatttcctattaatcaaacttaatctgaaacattcggatgaaagataatcgttgaaatcaacatttccagagtttatatcagcaccatcaccagttaatctttgttcaaacaatttttgtagtgaatttgtagtaaaatcggttggtacgtcaatatctaatgtacatccgccaaatacgaaaactcttgaatttgaaatatcaattgatgctcctactcgggagtctaactttagtctagagtcagtgctttcaacatttggcatatccaaaggatagcatttgtttgatgagagatccagtgctcccattgctttatttaatgcacaatgtagtcaatatcaattgaaaataaaagataaatggcaattgctaataactgttaatttattattgattagcttttctagcagtttcatgcaataattcgggaactttgttaggttgaaaaaaagcctgaaatttccgaaagtgctgaatgttttccaaatttccgaaacaaaaacaaagaaattgcactttcataaaatgagaacatgaattggcgagcattatcacaaagatttaaaagtggtgataatcccatatattgatatatagagtagattctacaggtaactaaccagactaatagacaacataatatgcttccgttgtacttacttaatgccgtaaaaggtgaacctgttattgttgaattaaaatcaggtggacttgttaacggtatcttagaaaactgtgattactacatgaatgtcactttaacatctgcatgtgcatccctccaagaagacagcgagttccacaaggtcgatcatatctatatcaaaggtactcatattaaattgtttaagatgggtaatgaattcattgagaaattcaagttacaccaacaaaaggaaaaagatggcagtcgtcatggtaataacagacaaaataactacaatcacaacaacaatcacaataacagacctaacagtagacaatacaataataactataataataataacaataataaccaaagacgtaataatagaaataataacaatagcagaaatggaaatggaaatggaacaggagctggaaacagagaagaattaagattttaaagtgtccatctatttcattacaatgtatattaactgttagctatataaatttgtgtttttttcacccctattatatcttttaataaactaaaaaaaagtagaaaattaaattaaatcaaatgaaagtcagagaaagggtgcccatcccataaaaatgactgaaagattgttttcatctgtagcatcacgaattaattcacgaacaactgcttcatcacttaaacctttagcttcgagcttgtttttaacagtctcaatagcagtattagcttcaatctcgatatcatgagttagttcatttcgaatttttcttatttgtattagcaacattgttattacctgtcacatcacccatctcaccttcggtgaaataaatcaactttaacttcttctttcttaatggtgataaagtccaactatataatggatcgtattttaaaacattcaaaataccactgatgtatagcttatttaatcgtaacactcttaaaacatgttcacaactcttactgaatataccatttacaccagtgatacccataccatcaaccaaatctcttgttaatctaaatggaacagtttctggaattggtaaggttttaccttgatcaaaagcaacaccaaaatcaatatgaataggttctccggaagatttatccaaaaggatgttgttacaatgtctgtcaccaatacctaaaacgtaaccagtaattgaagtggtggcaataccattagaatataaaactcttgaaccaaaccataaatctggtgatgtgaaattattatagaaaaatcctcttaaatttggtaacaccttcttacaaatatctttgtatacttgataacgaactgctttcgattgagtttgaacttctttcattttgagtcttgcttcatttatatccaactcgtcattaacatgcattgactttagaatatcaattaatggcactgagttgggtacgaattccaatacccctgatgttggtccaagtggtaacacattataaacacgaattctcaaatttcttttacgggtttctatatctttccatagtattttattgactttttcaaaaacttgtttcatgattgaatcttgtcttaaatcatctggtgctttcagtaacatcttttggttttctccattcgataaaagtagtttcataatctttggatgacttactccggatgcagcaattgttatttgttcattgatatttcttattataggtaattcactttctttgtaggaaccggtttttttcaccagaatacttttgacaggtgatggtaagtttagcaaaggtagggagtccaaccaccactttccatttggcactttggatattgatatctttttcgtattctttagtttagatgcggcaacaacaacagcattatcagcaaatgaattaacagattccaagatgcctgaaatgttttcaacattaaaattatgctctaagactttaagctgagcccaaattttttcagaaaccttacctctggatacagcagcggaatcatccgactcctttttagtcattattaatgactttaggaggtatagaatatggaatggatgtgaaagtgatatgttaataactagttttcggagaagaacctggaagtttgtctcttcatcaagtagctttgatactaattggttacaccaaggaacaaaattgaacattggtaatccgaggagttcatcttccccaatattgatatcattatgctcaatccacaaagagcaaaatctgtcaatatcattttcacagaattcatgattcccaaactcaattgatttaaaatagaaatggacagccttttcaatgtaattattactttcaagtttagatgcttgaaattcttttatatgagctttatgtctaatttggagacgatttaaatcttgtaatgcatatctttttttttccttatcagcttcttcttttataaatttcttgatagatcttatatctttttcaatcattttaatattactagaaactttatcaattgatgtgtccttagcatatctagaaatttggtcatcacaaaattttgccattatatggtatgtcaaccctaaatcttctaaaatatcaacttttgaaatattttcaaggctttcttcatttggaagaatataatttgacatgatcatagaagatgtttcctgtttacattcgtcgcaccattttgcaatagtagaaataatgagttctttactaattctggtaaaaccttcatttgtttctgaagttctttcgtctgacattgtttgtgtgttttccatttcaataatatttttcaaagtttcaataggaaatctggtatctgattgctgggtccaaaaggcatttgccaaattgaactttgctattttatgcacatgaatatttttgttgttatatctattttgagaaatctgatttaataaaactgaagaattaatagctttttgagtgactccattatcggtcataattttattataaatatggagttcgttaataattccaatgtagcacttagtgtcactcaaatcaaaatatttgatctgattgctgttcccacatttagttatcaactcaaaaactgaacgtctactcaacaagatattttcaaaatcagaaacagttgcatttctaaaccatatattagactgattgcatttcttcatgaattcttcaaatgttagattttcaagtgaagttatctcctccacagtattgcatatacttaaggtacgcaaccatgatttcatcgtgtcaatcttggaaaaataccctttaccaaatgtatttatatcaaaacttactaatttctcaattgcatcatgacatatatcttttgaatcttgcggacgttctttcacttgtctcaacacataataaatacatttattttcagtcaacccattatcgactacagggatgtcccattgattcaatttccacatttgttcatacaatatatctgaatttgatgaagcttcattgacggtgtcctcattttgtgagtactcagtcaatatattagaaatacctgaccagcccatcgtcatcattccatcagcaatatctgtaatagcatcataaccattattgttgttcaataaaagtctagaatcaaaaatagcattgctgaacatcatttcaccacttttaatatttttatgcttcaaaatttccaatccgtaactcatctctggcacgataggtagaccaaacattaaatcactattttcaatgccagaataagttgcttttaaatagttgtagtaagctggctcatgtaatagattttttacattaattatatctatagttgtgtagtaatcctcgtatagcattaaagcactcttgtttctgttgatcaacaaggcagcctcgcaaatttgatcaatgtagaactgtttgtaaatgcttataaatttcacattacctgctttagctccaagtctgattaacaaaactaattcaacaaatatctcaatggcttttttaggaacttttttcatattttccttaaagaatctatcaatcataaaaacaataaaagtgccacgtctagttgtttgggtctcgatgtagtaaagaactaaaggacaaaaacatttaatagcaaaagatggagaatggcaaatataatttgcaagaagaacaataattgatgactgtgacgatagttcactgataatggaaaacattatttcagtaatccatgtctcaatcttgcatgtacatatcttggtggaaaaaccgttcaatgctgtctctaatgtacctctgtagtaagtgacagtattgtcttctacttgatcaattgaaagagagcatacataattgcccattggaaatataaactcttcaaacgaagcaaacaggcgatcataggaaataaatgaagagacactttctgcttgaatattaaatttgttcaaaataacaccaataattgagtcaacacaatatgtattcttaaggggtgcattaggaagttctgctagcaaaagtttaaaaatgatatccattgatttcacttcttcgttaaaatttaaaggaatactctctctcaataacgtattttcaaattcaaatgttggtgttttaggatagtttcctgtattttcataataaacaccaaagcattttcctatccatatagaaaatgatttcgataaaatttttgagtactcaagcttaacactgtaaatattgtcaataaatttggatgaaagtttatttctatcaatcttaaatctgtgtgattttactgctgagctgtaattaaataatgatgagatatattcaatcaaaacatgggtgtttgcggtatcatcaaaggcattattcacaaaactcacaaaatctggtaaaggaaaaccgtctgcattttctattatttcaattccatacttaaaacattcatcatatgcacctagtttaactttacttttcaattctataacaagctttttcaactcaacaatattagtagatttatcatctccaaacaatgcacccaaaagtgaggcccagatgggtattgagataaccgaatgtatatttttattcctctcaagcatgactcgtatgattaaagaaacttcatcttttatactttgactcttgagtaacggagccaaagagttagtaagtacttcacatatatgcgtatttttcattccatttggagcaattgtaagtagtaattttagttttcttacgcatattattttttcaactactaaaatagaagaagatatcaaaagcagtaatcttgatgttaggtgatatatcaactgaactgtccaaatttcttcaactctacacatattcgcaaaatgtaaaagcaaactaatacaggatttgggatcaatctgaatctcatattcatttaaaaatgacaagacttttgcatcggctgaaaataaattcagctcggtaatgtttaaaccctgtgaagagagggatttgattatttcactttctgaagaacagtcacaaaacctaaataactggaaagcaatcaaaatgaattgttctctcaatgtcattttcaatgtttttgcagatgaaaaaaagttctccaaagttttgaacaatttatttttaacaccaccatttgtccatgctaatgtgatcgatagtggtattgagtcacttacaatcgagtttggtttcatatcagtaatttttgaaattgtatcgataacttcaacatgattatatgccaatgacaaagctgtgatttccttgtacattttcagaatgaaatcttccaggtgtttgaagtcaaataacatgaagggaaacttttcaattggaaattcaaaactttcccagcactttaaaaaaatctctttatagttccaaaataaatgatatgcagattcaatattgttgagccttgtaatttgattaattgcatattgaagaaatgagaaaatattttcatactgtgaaagttccaacaagttgctaatggtggcaataataagagtttctgatgaaagtgaaattttagtcataaataaacaaaatgtcgcagatgattctgttgagaactgtggacgatgaaatgatttcacaaatttcgaataaataactagcttatcttcattatttttcaccaaatctgttatagattcaaacgtttgaaatttaaaagaattattcattaaagagaaccagctctcaagatttgcaagtattttcgttttatcaaatgtagcacacttatcgtccacctggataagtagttgaatgcataacttaaaaaattccaacaatgatttttcagaatgtagcatatgcttttcatttcaagttcatcacaaaatcgtaaactgctttaccatcagattcaattcctttttttgagctaatccacaccttagcaagaattctgaataatttcaaaatcaaaaataatgagcattcataggttttagttatatgattttcaagtaaagtggtgatatcagtaaataataaatcaacaacatcttcattgagagaactgttagtacactcaatcatttttaagatttcatattggccagccaaaaacttttcttttgatctgattttcgatatgaacttaatagcggtctcaaatgataactgaatatccatggtcgcaaacgcttgtttcaatatataatgagttgctttttgttccaatgttgacctctcatagtaaagattgaatctgttgtatttaaaatagtctggaaaactattaaagctctgttgccttgtagttggtataaatgagtcaaaaaaatcatcttctctttctaaacgtgaatgaatttcttcggtgttcaaaacatgtaaagttatttccataaccttgttaatgtatacgatttgtgatatttttgtcagccaagtaaagttatcagcaggaatatgatcaatgatatcaaaatattcagctaagtactcattaaaactattattagatatgaaattattaaatttttcttttatcaactcaagcaataaatcaatggaatgtgacaactgcagctcatcggagtctaatagtaagcatgaagcaatcgcccacttgacattatgaacattttccgatagtgattctaaaaatttgcaaaataacaatctaatttgtgttcttttatgttcattgtaggataggatatctagttcaataatttttatattatcatctatagcttttaaattattgacactagtacttttcagtacataactagataatgtggatacttctttcaactctatagaagtttttagtaattcacctttgtaaacatattgtgtaaacattgaattgattgaagatctttctaaatcgtcaattccagcaagccatgaaagaagtaaacaaatcatcattatatcactataattagagatcaaaggcaactgtgaaaatttactatgaaaccaatttgatactttagatgagtatagttgatcatcaaacccattagatgctgcatgaaatttaatatttttgaatttgaaagatttatattgtttgagtgttgtaatccaaaacataactgattctttggatatatttgcagggccatttatttctgaaaggtcaatcacattttcatattgctgtagaatcgctttatccaatataattgcttcttcattggaagtaaaatgatacatcgatatatgtgataaaaatatacatgatggctcacacataattggatcttttaacaactctaaattatatttcaatagtttattgaaagaggggctattgtgaaaacatggaatcttcttattatttatttctctaaaatgtttgctatagttgaatgaaatgctataaataacatttattagaaaaagaacccaatattttaatgttatatcttgtttttcaaatatagtcataagttttgatagtatatcattgatattagttaggagatattttatcaaattttgggagcacttcaattcagttgttgaagaaattgaaccaaaggttaacaatgcaatttgacaaattgttacatctgagactaattcgaaatgagctccatcaaacaaaatagaaattaatgcgtctattggattgctgtagtattgaagaatttcagaaagtggaaatgatgcaccgaattgaaccgatgataaatgttgtcgtttatttttgaaaatagagacactttcggggtaactttgatctaactttgatttgagttcgtaaaaatggataaccaattgacttattccaagacgtaataaccatggtgtagaactttgatccttgcttaaggagatatatttcatgtgaaacaaattcaattcatttttgtcagtcgttggggtaagatgtaaattaacagacttatagggtaatgataaatttttctctaatgagttatcaaacaataaatttatcagaatttcaattgctttcgataaatcattcaatggatgcaatttagtaatagtagaatactctctagttcgctttttattaaccactatggttttctggaaactcgaaagatcttcatcttcgtcagataaatgcatactgtcatcgacttcggatgatgcatcaacaatagccgaaaacacatcagagatttcagatttactggatctatttgatataagagcagattgattaacttctggggtcacttttgctgaacctatttcatttggttctttttgatcaattaacaaaatgtatggtggaatgatgttagcaaacaaagataattcatttattaatcttctagactttatagctttgatatctagtaagaactggattccaatctcataaaagttatagcaaatattaacatttgtggatgacaagtttatcaaacacctattaatcactttaaatattacaatcaaagattcagattcttttttgctttcggagaatatgtacttaaagtatttattcaaaaattgtaatgttttcaaataataaccagctgctttatcatctgctgacattaaaaataagttacatgtagtaaatgatgggttcaaaatttcatgaaataaatatagtagttcaataatcaaactttcatttttggatgattgaaatacatttgtcacaagtagattcatacaaaaaagacatttctctaaaattgattggattgtattctcaaacagatgatctcgaaaacattgaacttgaagtaaatgaattagagattttatgaaattaaaagctattggatcaaatatttggacatcagaattagcaggggtataagttaagtttttaagtaatgagtttatgagtttttcactttgtcttggtttgtatagattaatgaaagttttattacaataaattgaagttattaatgattttgttattgatgaagctttgtttaaccttatctcaacggacgtattgttatttgatttttcataaatagaacgatcagtttcgatataataatctaatgaattaagtaatttgagtaaactttcattatcaaataaattaattgttgatgataatgagaaattaaagttttcaagtttttgaattgcttcagttctatctcgtatcttggatgatagtaataattcttaaaatataacaagagtttaattctaatgttagtaacgcgtgattatgttgatatacgaagtgacagaaatacataccacaaattgagtctaaagagtttcgtaccatattaattgactacctttaatcaattgtctttcataagggtatcttggttagattaactgttgcttgtaagaacaagaaacaagcaaaaaagggtttgaagaaatcaagtttctaaaaaaaaatgctgagcattgaaaatacacgacaaaatatagttactgtcttagtttttgttcaacttattttaccagtgaatatacagattcttaccattttgttactacggttgtagttgattaaagagaaaaaaccacttggttaacgaattaacgaaatttttatgcttgttatacaaagatgaaattattatctattaaaattttataattataatttaaatttaaatttaaacaacgacaccagagtttgaagcaattcttggccataaatcagcacattcctttgcaactggaccagtaatagcagaacctttcatttcaccctttggattaacaataacacctgcattatcttcaaagtaaaggtaggtaccatctcttcttctccatgcctttgattgtctaacaacaatagctggcataactttctttcttaattctggcttacctttcttaacagttgccataaccatatcacctgcagaagctgctggtaatctgtttaatctagcaccgttacccttaactgccataacgtataagtttcttgcaccagagttatcagcacagttcataactgcaccaactggtaatgcaagctgtaataataaaaaaatagtgataattatgttagtattaagtttctaaaatgaatggaaaattggtaaatatattggataattgtgaaaattatttattaaaattaaatttgtagtgaaaatttgatggtttaaaattttgtaactaatcgtatcatttaaaatctgtttattatgtttgattgtcatgtgaattactattaatccatatatttgaatctgttgattcaatttaaaaattattattatattattattattattattattattattattatcactatattattactaattttgggaagttccctttattaatggataattaagtagatgattcaaaactattgtaattatttaataacttatttcactttgtatttcattttgatttcagtttcactacaattgttataattgttaacaaaaaaaattctctatttatcataatcatatcatttaccttgagttaaagtctgaaaagtaatacttactgacattctaaatttagtaccttgtgcaccggaaccagacatcttgatatattagtatgaatatgtggtattctaccttttagaagcaaattcaaaagtctataatagtaaagtattcaaccaacatcttcatgaaaattctctatagtacaaatatttttttttcaccctcgctattcctcctctcctgtaaatttcctggccagtcacagtggattcccaatgcggaatataaatttaccattttgtgcgtcagaaaagttataaaaaataaggtgagggtttggtagccctttgcctgatcacgtgtgtagaattgaaattcatgatacataataaaggttttatatcatgatttcatgatttcatgattttgataagaacttttttattacaagacattcaaattgaagttatatttataaaagaaaagttatataagaatggctatattataaatcaccaataataagtactgttaataatcgaaaactttctataaatcgtaatattcctgcagatattgttgaacataacaagcaactcttttatacctcctttcactatatttttggaaaattgttttatgatgagtttcagctgatatacaacattcttctaaaactttagctaatggaattaattgttcacttgtataaccagtataataaacatgtgcttcagtccaatcacctttacctaacattttacgtgataagaattgtgcacctgcagctaaccaacttggtggtgatttaacaaatctagcatccataattgtaatttcgaggaaatattttgctaaagttctagtttcattatcataatcatcagcttttgaaccacgtcttaagaatgacattggacctggccaaccaaattcaaatcctaaaacctcaaccataaatctttcagcttttaaaaatgcatctctctgaaattgattaccaaccatataaaccatttgagaaactgttggtacacgaatttcttcatattttgctgcaataaataatgcaactgcaccacaaagttgaaatcttgataatgatattttatttttacttaaaaatctatcaattatattaactgataaaaataatgtttcaggtaataaattgaatcttgaatgaagttgtaccagccaatcaattaaagttgctctatgttcccatagaatatcatcttgaatttcttcgatatatcttggatttggtttatatttaatttctaatgaatgcaaataattgaaaattctattaccatattctgcaaccattgttacatcataagtatcctcatcatttggatctaaagtttcacgagagaatttagaataaactctatcaatttcatttcttatactatcagttaaaattggtgataatggagtatgtgtagttaaatcatcttcttcatattcattttcatcttcctcatcttcttcaactaaataatcgttatagtagtcagtttcaggtatataattttcttgatcattatttatgtttgaagtttccatgacatcatcaacatcggaggaagttaatggtgattcagttatggtatcatgtgattgattatcaattaaaacgggtatcttatttctaacattattgttgcttgtattattattattgttattattgataatattatgatgattttgattatattgttgatgaatattttgattatgttgttgattaaatgaatttaatgcactttctgggacaacacccaatactgtacgtgctctggcgttattatttgtactttgagaagattgagttgatagttgatgatgatgaatcattattgttagatctatgaatattatttgattcgttatttgatgattttgatcttaaaatttgattattattttcatcattagtattttgtgattgtgatctagtggaagctcttctaagcatttttgttatttgattttgttaattattggattagtaaaaaaataaacgaattgaattaaataaattaagtgaagtgaagtaaagtgatatgaagttaagttaagttaagataaataaaatatttcttttatgtataacttccgtttctctttgaaatgatataataaccttttaaatggattaatattatgtctatgttaaaaaaaagatttctgtgaggagtagttatttaacttgaaaatgtgataagtagcttttctattgaattttcagtaagtaaacaaactgctttattatttgttttgtaatatatactttttatgatttaaaggaagcgtggggtatagatggttttagtattgattaattatagtagataacttgctagaaagatatatattaaagaaatcaataacaaaactgtgataataataataaaagttgtttatacttagatgaagatagtaaaaaaaacaaagtgaattaactagctaagaaacacctggaaagcagacgtgaattgatataataaaaaaacaaagagagaaggattaatgataatattctgaagaatagagttattagaataataatcaaaacaaaaacaagtaggtaaaagtaaactaaggtaaactgaaatggaattgaacaatagacatcaacagtgaaatataaacaagggtattttccagtgtttacaattgccctaaaaaggaaagtgaacattatcgcgtttggctctaaatttccgaaaaatgggtaaatatactctccaattttccgagtatgaaaatttttaaatacatgaaaattacgtaaaaacgaaaaattattttttttgcgcttctcgattaggaatcttaaattattattttttttttttttggtttaatctttaattaatgattaatggaatttttatttgctttgacaattgcaataatacacatcaatgacatttgttgatagaaagaaatacattaaagaaggtgatttagttcttgtttatgtctcacgtacacttattaaacctgtttatgttaaaagtggtgaacatttcaatactagatttggttcattccctcatgattcaatgattggtcttgaattcggttctcaaataacaactccaaaagatcgtggatttgtttatcttttacaaccaactcctgaactttggacaatgtctttacctcatagaactcaaattgtttatactccagattcttcctatattttacaacgtttaaatgttaatgttggttctaaagttattgaagcaggtacaggatcgggatcttttactcatgcttttgcaagatcagttaatgaagaaggtaaactatatacctttgaattccatgaaaccagatatttaaaggcaaaggaagaatttacaaaacatggtttaaataatttaattataacgcatagagatgtttgtgaaaatggttttgaaattgacaatattgatttagatgctgatactgtttttcttgatttacctgctccttggagtgcaatacccaaattaactaatgttatttcaaaaaatcgtacagttggaatttgttgtttctctccctgttttgaacaagttgttaaaactgtcgaaactttacaagatgaaggatggttagatattgaattaacagaagtgcagggtagactatttgaatctcataaagcaatgaagagagaagttgatgatgctgttaaacgtttacaatttgttaaagaaaaacaacgtgaaggtcttgaattaatcaaagctggtaaacatccaaggaaagaagctgaaaaagattatggttttaatccttttggtaagggtaaacgtataattgaaggtgaagatggatatgaatggatgaatgtttcaagacttgaacatgaagttaaaactcatacatcttatttactttttgctaaaaaattgcctcatcatgcaataaaagttaataataatagtaataataaatctgaaactatttaattattatcttgatatgtataaatttatagaattaatttaagattgtaataatgtatagatcaaagattgtaatattgtgaaatttagtctgcctgcgcaataacatgaaattttgacacaatttgcataaatttgatgaatcttccaatgtttattctttatccacatacacgtcttatcaacaaaaagagtttaattgccaatgatgatagtcaattcattaaaatattttggcttttctctcataaaagcaaaaacaaactattctttattaaaaatctatcccggtacttaccgatttatgtctttggttcccaactcaaaagaatcaaaattaagctgtaacttattacaaaatcatccatcttatatacccaaaacaaatgcaattgataaaatgaaaaccatcattaaccatagagcttttagttcgaagaatcatcttttatcatattatcgtgatcctaaaaattcaattgttggagatggtattataagtagattatggtctcgtattcctgatagtattaaactgattagtttaattggtggttccgcttatttagttatctttgttgcagttccaatactagtcatgattttacctccaataattattggagggtggttattttttcgtataaataaatattttagagaaaaggaaatgaagagaagatgggaaaatattgaaaaatcaacattaatatattatcctaaaaatttatcacaaagtcaattatttgttccaccacctgaccaaatcaataatgaattagcaaattttgaaataaataggaataattgatgcattttggtcaaatgaacaaaatatcaataattatttcaaaattgaagatattgatgatttagcattaggtacactagaaggcaattcagtattcttataataattcaagtgttttatttgctgatgactttaaaatgatggtcattcaacaaagaccattatatgatagaaaaattgagaaagaacttgctaatgttacattaactttaaaatgtttaaataaaccaatgtatgaagatactgatccaagtgcaaatattagtaaaagtttagttgaaattgagattgtgccaactaaactgtttgctaaaccatttgtattaaatacaccatctgtcagtacaaaaaatcgtggtgatgacgatgatacatttgatggtaatgatgatgattcagattttgatgggattatcgatgttaagggtaagactaaaatcttataatattcaattttttattattttatcaatctatttagactttacgacaattattataaaacttctatctttagatatagatgtagattttatttaaactgtatcatattaaatatagatctactctgtagttcttggtttattcttttcagcttcggctgccttttcatcttcaatttctttcactataacttcaatttcttcatttgacattgatcttggatcaatacctggtttcataacacatatttcaatattttttgcaccagtttgaacaacttctaacaatgctttaattgctaattttattgtttcactctcatttaataattcatcctttggataatttttttctaaaaattctctaacagttttactattttttccaattgattgagctttccatgcagaatatattcctgatggttcagtttgatataattttggaattttatcattttcatcaaaacctgcaatcaaagttgagataccgaaaggtcttgcaccaccactttgtgtatatttttgttgaacacctgcaacatatctagttaaatattcaacactaactggatcttctaatgttaatttatgtgattgtgcttcaactcttgctttatcaattaaaattcttgcatccgcatttaaacctgcaaatgcaagttgtacatgataatcaattttattaatctttgttggtgtaattcttggatcttgtaattttaatgtagttcttctctcacatgcaagtacaacagtttcttcacctttaacacctactgcacatgtacctcttttaactgcttccagggcatattcgacttggaaaacatgaccatcaggactattttaaattaatatgttagtaaaaagatctaaatatatatctattcaatttcatacatacctaaaaattgacaatgcactatcgtaaccactcattattgcgttctttgttgtataaaatgataaaaatcagagtatttgccttcaagtattgaaaagcttgaaatacaaatcatcatgaatttagagagtttcttcgcactgtcttttttttcttacagtgcctaaaaattattacactgggaccttaatctttgaattttttttaaaaaattgtaggagatatgaccgataatcctggaaggagtaattcatgtaaggttgattctggtaatggtaataatcaaaagcaaaggcaaaagcaaaagcaaaaggaaaaaggtaaaggaaaaggtaaagcaatgaagattccaacaaatatacctaaaaaggatcattttcaaagagttacttatttatataaacttggacatatgatgtcaatgaaaagtaataataataaaactaatgatactttatcaagaagttatttgaatcatatggatttagttagtaaaaaagcagttttaaaattacatccagatattaaacgaactatttgtaagaaatgttcaagatttcaaaatataggattaaatagttcattacgaatacgtaataattctagaaaacaattagataaatgtgatattttagagcttgaatgtagatgtaaagagattaagagatttccgattggtagtaatccagaatatgaattatttagtgaacgacaggatagattatttgaaatggaatcaaaatcaaaataattttcattaatgtacaaagtagttgaaataagataatttatatatatatttatgtattatacgaaagcaccatattctaatattttaacagcatcttctttctttttattcttttcatctcttatatcttttttaaatctattataagcatcaataaaatcaattctttcccagccaattaatgatttatcttcaatatcaatatctaaatcaccaatcattcttaaattttcacctctaataacataaatttgaggttttaaactttcaccagtattgtttagtttcagggaaataaactctttcaacaccatcatgaataactaaattaccaaattgatcaaaagttcttaaaactccaataattgaacgtccacctattaaaacagcattaacttttctatcaacaaatccaataatagcagcagctgtagtaaatggatatgattgtaaatatatgtcttcttggaacatattgtttgaacttggttgaaggaagatgttaagctttatatacagtaacagaattcaaagttgtcatgaagattgaattttgcgcatggttgaaaaataccgaaattattaagattttaggtaatacagtgaatcaagtattgatattacatcgttgtgatatattagaggtatttacaaagagaatatatatatatatatatatatatattataagtagtagaagtaatgtagtgaaaatattttagtgaagtacttaaagaaatccatttgcctttcttctgtattcattacaatctcttaaccattgtctataatcttttaatgaaccaattttttcaccataataatcaggaactggattattcatactttgtcttgaagcatcaactctcattttagcaatatgtttaaggaataatttttgtttgattttgaaaactggcattgattttctatttaaaattgcaaataatggatcaccaataattgatgggccaaaaaggaaacctgcaaatcctgtacataaaattgcaccaatatagcaagtaaaaatatctaatccaaagaaagtttcagttggatcaatttcaacttgtgataaatatgaaaatgatcctaacatggttaaaattgctgcagctattgatccaataccaccaagacgtctttgttgtttacgtaaagataagaattgttcccaagtcattttacttgcaatttcagcttcttgtgctgttggttcataatctttctttgatgaagttgaattaaaacgtttattaaaagaatttaaaaataaagaatttgaagattttaatgaatttaataatgttgaagttctagataacgtattaagttgacgaagtccaagaccaagtctaagacccatagttctagttgcaaacattgttgtgtgtgtatgtgtatgggaactgtcaataagaaaagacttacaatcacaggttaaattagtagggagagatggtgttttaaaatagtgagcgaaatggtatttttttatgaactcatttcttggtattggagttaaggctggaaaatcctagaatattgttataataataactttgtagaatctaatatttttagtattttaatagttgttatagaaattttatagaaaaggactaattaagaggtataaaaaatgatatccaaataaggatgtgtatatgatatgtgtaaatgcaaaataaaccgtaataatgaatggatagataaatagctaactacttgaatgcaagaaattttctttttatgaatgattaatttaatcatcataattgtgttctaaacattcaggtaatttttccattgggaaattttcatagatgattctataagtaacttcaaagagtgggaattttgaaatttcacccatgttaactaagaattcatgaacttctttacaagtatgcataccttgacaagattggccatttaataatttttcttcagcttcaaaggctgagactttatgttctgccatatatttaccaactctgacattacgaccacctgaacaagttgtgattaaatctgcaacaccggcagattcataagagaaagttgaatcttcagcgtttttgaaaaacattttagcaaattgaattgtttcacataaaccaattctcataacagcagattttgcattatcaccccaacccaggccttcaacgaaacctgcagccattgcaacaacatttttgagtgcaccagcaattgatataccttcaacatcactgataactctaacatggaaataaggtctatggaataaacatcttaaagtttgatgatcaatatctttacctttacctctaaaatcttttggaattgaataagcaacagttgtttctgaccatttacattgagcaacttcaggagctaaattagcaccagataaagcaccacaatgaataccaatttcttcagtaattgaagttgataataatttacaaccatcaggattaacttgtaaacctttaagacaagagattgctcttgtatttggattaactttaccctttaattgagacagaattcttggtaaaaattgatgaggaatattgaaaataattaaatcagcattttcacaagcttcaacaatatcaggtacagcaataacatttgcaggtaatttgataccaggtaaatatttaacattttcatgctttgtatttataattgaagttaatttttcaccttcaattaattcttcgaaaacccacatattaacatttctttcaaattgtaaaggtctttcaacagtattttcagcaacaacttttgcaattgttgaaccccaattacctgaaccgacaactgtaattctaaaaggtctttcaggataatcttcaggatctaaagaagttgaatctttacgacgtgggataattgtatttgcaattgatgataatctttcagcaggagtagtacacattgtatttgtatttgttttatttaattgattaatttttgattgactttgagtatgtaaaaatttatatgtagtagtagatttaaattttaaatttaaattatttcttatagtagatgtagttaataacttctttgataagaattgtttgataaatagagacataaaataaaaaaataaaaggaaaaattagaaacggataaataaatcgattgagataaagaggaatagggtccagttatatagtgcaaaaaggtaaaaagataaaaagaggtaaattaattaaaaaaaaaataaaaagtaagaaaatgcagaatcatcgatgatggacacactatttccgtaagaaaaagaaaagagaagggcgtattagcctacaaactgaaacattttcactgggaagttacgtaatggttaccgtacatgtcatagtgacgtagccattatcttatcttttgggctattactatgcttatgtcttatctttttgatatattgtattactactgcattacatcattatttttaagtggttaacagtaaattagtttatggttttaagtaaattagtcttgtgtacactgtagagtgtagactattaataaaatgtaatgtcacgctgttttcttttattttggtgtattacgtaagtatacgtggattatgtaataaaatgtgattatgtaatcatttacaatacttaaatatgtgcaatatacatgcagttataccattctacattcaatacttacactacaattaataggaacagatatttatttggtacattatctcaatattaattaatgttaacttattatatttatttaatttagaaaaatttttattatattataatttaaaatggtacacttccaagtgttgtaccattacctttactaacttgtaatcctaatccattaactttacaattttcaattaaattccataatgattctctaattgttttattcttttcattaatttcatcaatatccataccatcatcattattattattactattaccctttttacccttactcatttcttcaactcttctttctgcatatttaatatttctattcactttctttgcctttttatttgacattatagtatttgcaacaactcctccaccattcttaattggtacaattgctaatgatccattagatgattgaattgttgtaactgcttgacgtgaacgtattgctcttctctttgataaaagatgtgatttcctttgtcttgtaatattagctttgggtttattaacggagttcttagatggcatattgtcttgtcttgtataatcaataagataatcaataagataatgataatgattatatgaaattttattgataatgaataatttgtaaaaaaattttcatgttaattttttttttctcactaagggatcaaaaaatatataagtgtaatttaggattcgagaatgtgtaaaaaagtgcttttaactgctgggctaaactagagatgaagtgatttaaaaattattttataaaccgctttttgggggtttttacttttgtccctcttttacaacttttttgtaacttacaaaccacatctttgccaaataacaataaataatgtactcaaaagcattatttgactccttaatcaaagttttacaccatttttaaatctcacaaatatttagattttttgtctaacatttcctcaaaaggttttaaaaagttaaatttatttgaaacgtcaataacttttttataattataaaactataaaaacactctatacatcagctatacctctcttttcaaggttaacttgaacttcatttcttaaatattcaatcatttttgatggatcatcagctttaaagacagaagtacctgcaacaattacatttgcacctgcttcagctgcaatttcaacagtacctttacctaaaccaccatcaacttgaatatttaaatttgggaatttttttcttaattcttcaacttttggcatcatatttgccataaatttttgtccaccaaatcctggctcaactgtcataattaatgccatatctaaatatggtgctaatttaaataatacttcaacattagtatttggtttaattgcacacgcagctttcatattaaaagatttaatcaatttaattaattcaactggatttttagttgattcataatgaaatgtatattgatcaccaccagattttgcaatttcttcaacccattgttcaggatttgaaaccatcatgtgacaatcaaaaaattttttattaactggtttatcctttggaactgcatttcttaatgatgttataattggtggtcccattgtaatatttggtacaaaatgtccatccataacatctaaatgaacccaatctgaaccacattcaaacatacgatgacattcacatccaagttgagagaaatctcctgcaagtaatgatggggcaataattggtttaaccattgtttaataaaagaagagatgtgtattatagtttacaaaaatggattaaaaacatggggtcattaaatttgtaattaacagtaaaggaatatttccataattcctcaccataaaaaattggaattttcttcagtttttacattgtaatttcggagttttagtgatcggcattttaagtgaataataactttgttttctaaatagataactatactagtataaaatgttcttgtttataatatatacgataagtacttaatcttcttgttctgataatgtcttaaaatacatcttttcagtatcaaatttgatacctctttctaataatttactaaaagcattagcaaaaacatttaaacatttttcttcatcctttgcaaaaatttcaacatattttcttaaatttgaatcagttttcaatgccatatcagctggtaacatcatcaaactatgtgttttttcatcttcatattgttttttaccatcccatttcttaaatttccattcttcacttaataataaagtgaaaaattgatttgaaacaacagttggtgagaaagtccatggaccatcaaaacctgaattttgtttatgacatctaccaattgaatgaccaacaccaattaatgcaactaattcttcatcattgaaacccaatctatcatggaaaacatttcttaaataactacctgttgtttgacttgcatcaggtaatctatgatatggtggtgtataatcagttgataaatcttttctacctggtctccaagcaatttttggaccttccatttcttgaataccaacaacaccggaaagtgtaaataaatcacctgttgaaatttcagggaattcatccttaattgattttaaaaattcaatacctgtcactaaacctgcattttcaggatctgcttgttcctttttaaatctcattgtaccagcatatgaaccaccctttaattcagaattatcattttgatcatatgatccactattatgccaagctaatctaactaataatggagcataagaaccataatcataatcatcaacatcaattaatttttgtgcaattgcattataaactttttggtaatattctttattttcaatttgtccatttgcacttctaacatttgcttcaaatttattttctgaatcaactgctttacttgcacccaaaccaaataatgctttactgaaaaggttattattgttattattgttgttatttctattattgttataattataagctaataaacctgcagatgcagttaatgcaattgaagccaataatttagaattgtatttgaaatgtgatttagtagattgtttaaaagataaacgtgcgtaattgttaattgcagacatcttatttgttgatatttaaagaaagaagggaaaaagaaaaagagaagtgtatgatactacaatttacaataaagctcaagggaatggccaagcattaaatacttttaacaaagaaatgaaaatagaaatgaaatgacaaatcatgaaagaataatttgtcagaatgatataatggtctcgaatgaaaatcagtggggttattaataattaaaacctttttggggctttaaccattattgtaaaaaaatgctccattttctagctgaacatcttgtgcttttggtatgtgatattatattaataataacattgagagttttaataatagatatagatctagaatagattcaagaatgaaaatcttagttattagatccttctctttcataggcttgccaagccataagaaatagagtagagcaaagtaacaatgtaatgtagggctatgtgatgttttgacgaaaagcttgtaaggttaaggctttaaggttctttaaggttaaagctttaaggtttaattatattacatcatatagaggtttcagtaatgagactaaaatcactttccccaatatactatcaattactattattcagtatttttttacttttttatttattttttaatgattacaggattattaaattaaagtgttaaaacgttcaatttaataaaaactacatcgaaattgcagcataaatcataggtagctcactttattagtctcggagctggtaatgattagccattttttctttgatattgtttcctaatattccatgttaaatctttcttttaaatttggttattaaacaaacaaaaaaaatcttaacttggaatttttgtaaaacaataatcaaatgcctttttttgtaagtgaaatcataacccaaatagaacaaataaaaaaagactaacatagataattaaaaaagcaatatgaaatttgtaaaatgtcaatgtggaaaaatgtataagaaaacaatctaaatgaatgtataaactagtttaataatttttattcttaatttatttataattcttcaacaatgtgacctctttcagaaacatagataccatctaagaattttctgatatccttgtttctaactctacagatttgttgaacatctgcacaagtttgggaaacatcttcaacagaattaccagtaacaattaattcatccttttgaccaagttcacaagtaacaccggttgggattggaacttctctgaccttcttgtcacctaagaaatttctaatttcaataagtttagaaccttccttttcaataacgttaacgttgattgggaaatgcgcataaacaaatttcatcttgtatttgtaaccaacggtaacacccttaattaagttagtaattaaagatttaacagttcttaaagtagcaacgtgctttctgtcaccattatgaacgtaaagtttgattaatttgttgttaactttttcaaaagcaacatcaacgtgttttaaagctttaactaattcacctcttggaccagtaactttaacaactctggatttgattgagacggtaacaccttctgggatagcaacggattcaactgattggacgtacttcattattaattacaaggaatttttgttgttagaagaaataaggtaaaataaaaaaacttttagataagtgtcatgcagaaatagttgaaagattacatccttctcttttaaagcgaggaaagtgaaaaatttctgaaaaattttgaaaattttgaaattttgaaattttttttgtgcgtctttttctgagggagttcctcgcttttcattggctaataagagaatgggtcgatcgaccgcaccgcccccttgaaccacttattttattgaatttttcaattgttcagtatggcaacatgaaaatatagaatgaattaatgtgatcaaaggtttagaaaagtatattgataatatcgatatagtaacaccaccattatgtattctaatagtatatataataaaacagtgatactgggtaataatatttccaaaaatatattatctaatgttagaaattatcatccagtcgtattaccaaaagctataaagaaggcaaagagtattgaaaagaagaagaaaaatattgcatttaagaatacagttgaaaataagagggaaaaagttgatccaattttaggtaaaccaaacaatccatttattgaaagattaaaattagaaattcaagaaccaaatattttatcaaaaggttataatttaaatgatgttgatagattattatttggcgcaaaggaagttttaaaaaataaagcaattaatttaattggttcaacaactgaatcaattgaaaatattgaaaagaaagaaaatgaaaagagagaaattttattaagaattttaactttaagaaatgctgataatgttgaaaagcaaaaagttttaaatcaattagcaattaaagaatttcaaagatttgatggtgatactggttcatctgaagttcaagctgctgttatgactattgaaatttataatttaatggatcatattaaaaaaaatcctcaagataaagttcatattagaaaagttagaatgttaactcaaaagagacaaagaattttaagatatttaaagagggatcaaccacaaaaatatttttggacaattgaaaaattaggtttaactgatgataatgttcatatggaatttaatatggatagaaaatatatggatgaatttgaaatctggcctggtagaactttggttaatattaataaaaaggaaaatgaagaattaaagaagaagagaagaatggaaaagcaagctttaagaagagcattacatgaaaaacttttagcaaaggaacaacaaattgaaaatgaatctcaataattgtgtgtctatgtgtgttatctcatgtcatgatatctgattatcataataatcataatttaatctctaatttttataaataaaattctgtaaatatataactacaaaacatttcgtaatgtcttttttttttgcatttaatcacttttatacatcaccgatttcatatttaccccttttagcatcattaactaagatatatttattacattttggtatctcattttcaacatgtccaatgattaaacatgttgtatttaattgatcaattaaacatttacccttgattaaatcttcatctgtcattgcacttaatgcttcatcaagtattaaaattttaggattattaataattgatctaattaataaaactaatttttgtttactaacatgaatttccccaaatttaaaaccttttaaattatcaatttctaataattttaaaaattggttaattctattaactttttcattacctagctcttcaatagttggtggtactataagatccaacaatataacctgttgaaattgtttggaaaactgtatgtttctttggatataatgcatgtaattcaggtgatgtaaatccaataaatttatttgtatcaaaataattaactttaccaggagatctttcaataccaaatactttaattgatttattccaagattgtggatgatctagggttataagtgataataatgttgttttaccggatccattacgtcctctaatatgccatttttcaccatttttaacattccatgttaaatctttaataattggtttattcttatagctaacagttgtattattcatttcaactattgatttagtagggtcaattaaattattttgctctatttttttaattttacccatattcttacttattctatcttctaaaattttatgcttttcattgaaatttcttttcaaactatttaaatcatctaataaatctaaccttctacctgatttaacaatacctgtttcatttacaatgacaacttcatcaatccattcaggtatatcatcttgatttcttaaaccaataacaattgttgttttaatattttcatcatgggaagttttcattaatatattatcaacagttttagttgcaactggatctaaaccaaggaatggatcatcaatacataataatgaaggttcactatataatgatttagcaattctggcacgtctaaattgtccattacttaaagttgttaaaaattgaccttgtaaaccaactaaatttaaatttttaattaaataattaattttatctttattaaattcaatattcgaattataggattgatttgatataaaattttctacaatttcatcaatttcatagtctttgaaaaattcatatcttgaacttaaatgagtaaatccaccggttgaatcatgagcaccatgaccccatgaaccattattaacaaatcttaataattcagttttgaaaaatggatcatttaaacttgatgggtaagttcttgaattaattggatgtgaaataaatttatttgttaaaactgaaagaaaatcggttttgggatagtcaccaataacagcaactcttgatttagaatttaacgtatagttaattgaagatgaaaaaaccggtctaatatcaccattattgttattagttggttttaagtaattgcttttagtactaaaaatagatccgccagatcttgtaaaccaagcatcagagagttgcaccaatgcagatgttactttactcattgcccccagtgtgtttgcaaagcaaatctgataaaccatcaaatttcttttcttctccttctccggaccggtgtaggcttatttgcaaccgacaagaattcatgtaaaagattacataatcaaacagacgcatcgaccagaaaagaaaaagaaaactctgtacaccacaaaagttgtattattaatagtatattacgtaatggttccccccataatataattgctgagattgattgcgtctgaggttgtctgttgatagtttgtttacattgaagcatctgctctttgaagtttttcaaatttatcttttatcctttatctcaattcttatttatctcctcttatcatccttgtagtatatcattttatttattattagagtatctagggatattctatctatttcaatttcaaaaaaattcttttattaatctataacttatcctttaacgttattatattcattcatctttcaaatatccaatagcattttcattttatattgtattacattatctatatccatttgtgttttcacatatagttcattaatttattttatttcattataatcaaaaaacaaaaaaagattcaacaacctattacaatatgagtaaaacgtatgatacttcagaactttcaaaacatgtgcccaatccaccagtaaataacttatcaattgaagaaaaggcagaaatggaattcggatcactatcaagtgataaatatttagcttcagctcaacacgatccttcaattgagatcagaactcaagttttagatgaaccaccttattatgttgttatctcaacttatttaaattatttaactttaattataattggtcatatcagagattttttcggtatgactttcatgcctcaatattattctgcaatggttgctaaaaatggttatccaccttggtattcagcttttgaatcattttatccaagaagattaaagagaagattagatgattgttttgcaagaccaatttatggtgttccaggtagatatataaattgttttaatagagcttcaacagattataatgaaagtttctattatgatggtactgcaactccttgtttgaatttatcttcttataattatttaggttttgctcaaagtgttggtaaatgtactgatgattcaattgatgcagtttataaatacggtgtttcatcttgtggtccaagaaatgttattggtacaactgatttacatgttaaaactgaaaaaatcttatcaaaatttttaggtaaagaagattcaataatttttagtatgggttggggtacaaatgctcatttattcacttcaatggttaattcaaaatgtttagttatttcagactctttaaatcatgcatcaattagatttggtattagattatcaggtgcagctgttaaagttttccctcataatgatatggaagcattagaaaaaattttaagaaattcaattagtcaaggtcaatcaaaaactcatagaccttggaaaaaaattttcatttgtgttgaaggtttatattcaatggaaggtacgtatgttaatttaccaaaaattgttgaattaaaggaaaaatataattgttatcttttcgtcgatgaagctcattcaattggtgctttaggtaaaagtggtaaaggtatttgtgaatattataatgttgatccaaataaaattgatattttaatgggtacattaacaaaatcttttggtgcagcaggtggttatatttctgcaaataaaaatatttgtgatagattgagattagatataactgttaataattatggtgaaagtataccaccagcagttttacaacaaatttcaacttcaatgagaattatttcaggtgagctaaatgataatgaaggtgaattacgattacaaagaattgcattcaattcaagatatttaagattaggattgaaaagattaggtttcattgtttatggtgcagatgattcacctgttataccattattgatttataatccagctaaaatgccacgttttagtcaattattattagagagaggtattgcagttgttattgttggttatcctgcaactgatattatttcatcaagaattagattttgtatgtcagcagcacttacaaaggaagatattgatttaattttagctgcttgtgcagatgttggtgatagattaaatttaaaattttcaactggtattgcaggtggtgaaagaaatcctggtgattggaagaaaggtataaaaccaagatggtcaattgaagaagttatagaaaaaactcctgaagattgcagacatgaagtttattaattatatccaattcaatctctattttatttattactttatttttatgactttaattcaattcaattctataaattcatttctatatttcatttttccatttcatttacatcatatataattaaactctttttataaaaaaaatataatatttcataactaaaaaaaagttaaataaaataacaacttgctacataatagtaataatcatagtattattattatcagattatttatctgttttaaacgttatcaccaatataaccaataactgaaagtaagaaacctgtacctaatataacacctgtataaagatgactttctgaaatttgtgataagattgatttataagtttcttcagctaattcaactctgttaacaacaggaactgtaacttcaacttctttttcttcaagttttggagtttgattacccagatcattataagatgaattatctaatggagaagtatcttcttcaggatttgaaacttcagttacagttttcttttcttgtctataaataatcttctcttcttcattcttaattaatttttgttcattattaaatgaataatagtaattatatcctaaagcaatagggaatgttaaagctgcataaattaaatatggatgtttaccataacttggagatttagagtatgcttgatagaacaaataacttgaaattgaacctaatgaccaaaaacttaatcttaatgatacaaataatttacatattttttcctttaaagatttataatcacctgctgtatttgcaacaatttttggaattaattgaaatgatgttaaaaaatatgatccacttgtgataccaagtgacccaattcctactaatttgacgattgttaaacacttacccatatttatttaattgattatataaattaataatttacttagtttggaaaggaataaaggttattcaatcagttaaaatgggattataaccaatatttaaatgatgattaaatgtaaagatgaaagattgacatctcccccacgatctttaacaatcttttactgtattacctttccctcagtttctaagagggaattgccttatttttctctaaatttaccgcggaaattacagcctttaatacactccaattttccgatggtagataagtatttctgtaattcccattaaacttatcgatgagttgcaataaatggatgaattagattatataatgaatataaacatgtaaaaaaagggatttaaatttgatttttaaacaaggattgtatgcaagattaaataactaacaaaattttaagtaataacgggaatggaaacaaaaagacaaaaaaggtataaataaattagtttaaaaataatgcttaaaatgtttataataatgcaacaaataataatgcaaggctattaaagccagatgaaagtttaacaccatcatttctttgagaagttgaagagatactactgactgaaattgatgaagacgaagatgaagaagtagttaatgttgatgaagatgatgaagatgatgaagttgatgaagatgatgattgggtagtggaaggagatgatgatcttgggttagaagaaaaagatgcagaagacaaagatgcagaggacaaagatgcagaggacaaagatggagatagagacgaagatgaagatgaggatgaggattgtgtagatgagtagactgatgatgattcagtactagaagaagaggaagcagacgcagatgatgatgcagatgcagatgcagatgcagaagatgaagaattagattgtgaactagatgctgagcttgaacctgatgatgacgatgctgatgatgatgatgatgacgatgatgataaagctgttgatgtgaaagctggagtagaattgatagtaaatatgttattatttgaaccataagtcgaagagttttctggttgtttagcttgtggaatttcattattaataatgtcaatatttcttgaacctccactattagtacccttagctaatgaaatagttaaatcttcaagatctgcaaccatataaacactgcttaaaaatgattggcctaaagtcatataatcttcacttcctgatgacagaataccaaacgcacattgacctgattttgtattagtttgggtatataaagtaattaagaatgatgaaacaggtatatctaaatttaaaccttgaaaattaaatcttaaaattgaattatccgcaatcgaacatgcaccaacgtaatattgtaaactttctgaatatgataaatcaaacaatgaagtaattgaattaacaatactatcaggaaaataacttaatgtagtacccgtatctaacaaagcagcaattgcacctgaaccaatttctgcaacttgtgaagattcttcattaataaatttcagatcattcactgtaacagttaattgaattggcgaatcaacattttgattatataatgcattaacaattggtaatgaaactaaatcaccagtatatttagatgaatcaactgccccaaatataatttccgaattagatgaatcatccaaataaacagaatatgcagctttattaataagaccatcactgacaagttttaatggtaaattttcataaatataaggagatgatgaaccttgtgatgtaacttctaaaccaccaagaccaataccaagaacaccttgtgcattatcagtttgatcacaaactgcaatattcatattttcaacttcaatattaccaaaatcaattgtatcttgaccccaagtaccttttgcaaatgtattatctgcatatgtaatactgaaagatgtaccatttgaatggaatgatgaagacttttttgaattaaatgtaccatattcagaacaatcaatttgtggagcagaagaagatgaagatgatgccttattttgataattatctgtaatattatcattgaaaattttacgaccttttgatttgacagtacctgcttcacaatattcattatctgaactaacaagccaaaaatctgaggaacctgtatcaactaaaacaccgactttttccttatttgaaccaaccaagacatttgccatataaaaagtttgttcatcaattaatgagagactgacataatctgatgtatcgtctcttttaacatgatgtttaatttgaacattagagacaactttttcagcagataatgcccaatatttttctgaattagatgcaaatgtaacaccagtaaaagcactgaatatggagagaacactaagtggaagcattctttattggtttgattgaatatgttttttttttaaagatatgggtatataaaaaataaagaaaagagttataatagagtgaaaggaaagtaataagtttttattcaaagttatgaaacaatagtacctggacaaagaacctgcgtgaaactgttatatttaatttgtcaactcctatcaatggaagacagaatccaattatattgcaatgttaatggttccaataatgaaagtgcaatcagaagaaaaatttgttaatgagagggaaattataaattcattattcaacggaaaccagccactcacattttcccgatgaggaaggtagcatgtttattttaggaaattgtaattatacgtggtgcatccattgactgcattggtcgactgttatactaagttattatgattggagtgaaatagttgtaaagagtgatgttaagtacattatgttaaataaggtagtataaataatattacagattgtatcacagtaatgagagaatcatccatatccatgtaaaacatcgactattactagtattgcctgcgttattggaaaccttagctatcgattcaataagtgagtgtgaagatgatgtggatagtgaaatgagagaggtagatggtgccactgatttgctgtttataagactctttttgtggtatgtgctgtgttgatcaaaatttgtcttgatagtttcattaagagtggagtagatcatatgttgtaaatcataagttgttgaatctggtggagtctttagattttcaatatcttctattccattctctaatacaataatatcactttcattggatgggaaaactgcatttgctaatgcaacagattccgaatctaaatcaacaaccatgtaaatactatcaaggaatgattgtccaagagctataaattgttgcatataagtttcagtaattggtaaaccacataatttttgattatcatgcatatatgcaaagtctaaaattggaacactgaagtttacaccttggaagttgaactcaaacaacttattatcaagtttagaacattctgcagtataaatattagcctctgaatcataatctaaatcaagttcattagcaattttttcaagaattgactttggtagcattgcattagttacaccagtatctaaaagtgcagacatatatccttttgcaactggtattttttcatcaactttcaaatttaaaattgaaatttcatttaatgtaattgtaattgcagatatattttttattcctactaatgaatttccattcaccaatggaaacttataaatttctccatcaaatttgttgttatcaattgcaccaaacaacaattcaccgtgtccataatcttggtctaaatatattgaataaagatttctatcgattataccattttcaactagtttcattggaaaattattgtacatatactgcgaaccatcattaacatgataataagtagactcacattctggtaatccaagtccaagtagtccaaaatgctgtgacgtgtctccaactactgcaaaagtcatatttcccaataatgtgtcattaacaaaaaaattatctgtaccccatgtaccattgacatattcaccataacctgaaccataaaccattttaaaattggtatcattagaatgaaaagtttctgagttgtttatgtggaaatatttttcattattagtattattcgttgattgcgacgttttaacccaagtatcagaagaacccgtatcaatttgtaaagttaccaactctttttcagaaccaacttcaagatttgttacataattcattccttcaaattctaaatccaatttgagatatttatcagcatttgcagctgctaataatagcagaattgtttgaataatcatagcaagatattatatttgtgaaatgaaatcaacttgaaataataaagctatgagtttcttttcaaatattattttcaatcaagtttcaatacttgtatgtacctttggatattatatatagttttgaataaagaaagtatctttttttagcaagctaacccattgatgaataaacttgtgtatcagatagctgaatccagtgtgaaacgtcttgctatcgtatcaagggatttccttagcattcccaaagtagtattataatagtataaatctcaattaggcaagtaagccgattttatctttagaagagatagctccttaagggctcatcagtttttattatcgatgtaattgtatataatatgtattctgttgccatcttattgttacaacatatatatatacatatacaatgactaacggaggaaccaagcatctagatagtttaaagcataacatttatgaattgcatcaaaatcatgcagcaacagatttattaaacaattctgaaaactttatttcacaattaaagaaatacagacaggaactttataacgaaaccagtgataatctctcacataaaaatgaattagagaaagaattgagtgtgaatatcgattattataatgcacaaacatccaaatatgagaaacatattcaaaaaggtattaaaatgtatgcaacccgtattgataaattaggtgggtggaatttagatactgtatataaatacaatacaattgatgatgatactcaacttatgatgaagtctattattatggatcttttataccagggtaaattaagtgaatctaaagagttattggaaagtttggaaattgatgagaaacgacaatttgttgaagtttataaacattttgaaactttaaaatctttaattgagtcactacacaatgaagattataccattatttatgattggataggtgaagaaaaggaaaatattatgaagataagtagtctaattgagaacttgaatatgctagtttattttcaagtattagagataaaggccaagcaaaagaagattccaccgaatggtaatttacttttaaagtgtcaaaatgaatttgatgcacaagtaatgaacaaaatcaaggataaatgtttaagttttgataatagcacatggttttcagcttcattaccagaattgaattattttgataaagaagctatcaagaatactacagaggctgaattaattaaagttttcaacaaatataaaaccaattttttaaatttaaaggaagagtccccattaaataaatgtttacttgcaggtaattttgcaattgacactctgttgaagttcaatttagttagacgaagaaaaagcagttccacaataaatcgatcaaagggaggagcaacagtaggaggtaataacaatactaataatcatgctaataacgatacaagaagaagatcaacaatatcatcagatggatcagttcatccaattttaagtagaataagaagcttgaacacaagtgataacatcaccgatgaaaacgccttttatgatggatgcgttttccaattagagaatgagtacacattatacggtgaaaatgatcaacaagaagttagtgaattgccattagagattgaattacctgaatggatgtcaagtcatacagtttttgtatgtccggttttgaaggaggaaactacagaaacaaacaaaccctgtatgttaccatgcagacatttcatttcacgtctagctatgaataaacttgtacgaggagtaggtgatgagattaaatgtccatattgtccaggtcgtagctcctacagagaagctaaggaagtgcagtttgtaagaaatttaaattaggaaggttaagcgatgtttaaggtaaaaatttttttcactactaaatttatttactattgcagattattgatgataggcctactgcttgattgattgactattattattatgtatcctacattgattgagaaaatccagctttatatcgattatatatacataaacataagaaatggcagcggcagatatacgtactcagaatagaagatccagaaagaagagaagaactgaagtttcaagtgatgaaagtagtgatagtagtagcagtgacagtagtagcagtgataacagcgatcatagtgatgttgaaactaaagatgttgaaattaacaataaagaagatactttaatggaagatgttgttgatactgaagatgttaataacaacggagatacagctattgacgcgttacagatagaaccatctttacaagataaacgtgaagttttagagacacgtcttaaattacaggaagtatcagctgcacttgcaggtaccttaaatggatcaaatagtagtattttaaacaatttacctatagatagtgatgaatggatgtcgctaatggtttctaattatggagatgatatcgatggacttcgacaggcaggcgacttcaaagatggtagtgttgcattagttgcagagcttcttagatcatcacaaaatgtgtttgcaccacagtagatcatcatatatttagaatattctgtataattcagcaatatatattactaaagaaacgccaaaaaaacttaaacagtgcagaccatgtcctgtgatttggaaaaaactgtataaagggaaggaacgaggcttgttatttttttcatttcgttattgtatctaggggtcttcaacttaatatatctttcttctccttaactttctttatctacttttctttctttctttatacaaatactaacattcatctagtagatatgaagcccgctttaatattgtctatatttcttcaacttgcagctgcctctccaattagaggtatcactgatattttctcagctgatgcacctgctgatgccaacaaacattcttccaacaacgttgaaactgaaaaaccttattatcttagattatctgccgagaggtattacggtaaaacttttaaagaagctacaaaaggctcacaacctcaaatttatattgaatcagatgaactcatcagagaagaattagaaaagagagatgataatgatactggcgcatatgatactcaaagcctccccgaaggttcagcattgttacaaatggtcaaccaaaatacattttatttatctcttcttgaaattggtacccctgcacaaaaagttggtgttttagttgatactggttcctccgatctttgggtcgttagttcaaataatagttactgtatgtcaggtactacaggtgctcttacaagttttgatgtttttagtgaaaagagaatttctgaagattcaattgctgataaaaataatctcatttatagaaatgattctactgatgatgaatttcatgcaaaagcatcatcatcatcaagttcaagttctgatgcaattaattgttctgtttatggtacctttgattcaggctcctcagaaacttttaattcaaatggaactagcttttcaattacttatgccgatggcacctttgcaaatggtggttggggtactgatgatttaacagttggtgattttaatgttactgatatgtcatttgccgtttgtgataatgcagataatgcaatgggtgttttaggtattggcttacctggtttagaaactacttattctggtacaacttctgcatcttcaatctttagctctccgtatcaatatgaaaatttccctctgagactcaaaaatttgggtttgattaaacaaactgcatattcagttttcttaggttcatcaaattcagatactgcagatattttatttggtgctgttgatcattcattatatcaagatcaattagttgctttaccaatactcaatactctggaatcaagaggttatgatgatccaattcaattggaagttacattgaattcggttactcttgtaaatacagatacgaatcagcaagcagtcattggtactggtgcagctccagctttacttgatactggtactactttaacttatgttccacccgatgtcttatcaaccattttgaatttaattaatgctagatatgtctcatcagttggttattatattgtcgattgtatggatacagttgattatgaattaagttttaattttcaaggcctcagtgttccaatttcactaagtagatttgttatttctctgcaaagaaatgatttatgtatggttggtttacaatcgagcgataaaagttcatttactctaggtgataatttcttaagatctgtttatatggttgctgattacgataacatggaaattggtttggctcttgcagatacttctggtggtaaagctgcaaatattgaagttttgtcaactggtattccaaatgctgttgcaccaaattctgcattagaatggaatagtaaaactacttctttatcagttcaaacagacgttacaatgtcagcaattccatcaactactacatatagtttccaatcaaaagacaccaatggaagatctactacaactagatcaaggaatactaatgttagaacttctacttcaagaattgttagtactatcacacaatcatccagaaatggagcagataatttagctgcaagccatggtaatttaatcacaggatgttttatgtttttagcagcattattatagtcagttaacttttgcattaataactctatttgttattacctttgacaaagataatataattataaaatgaaaaagaaaaaaaagtagaaaagttttagaaaagataaaaatatattacaccatcttgaattttcattgtttattattaccttttgcatgaaaaaataccataattttaccgtttaacatttatacattttatattccctgttttgtatttagttcgttttgtatacctctaacaaattttaatttaagcaaagctttataagagtaaaaagggaaaaattgcatctcctatatacagaaattgttacgtaatgttatattttagcgatgatagaacttttattagtggctgcaacaaccaaattggttcctttaaagtgtatatcagtgaaaagaaggcttctagaaggcaaaaacagctgaaatgtcaacctttgtctatttaccattgaaaaaaacaacagatattgattgggaaagctctttgaacacattcctaacttcaacatttggtcgttcatttacttctgaaatatcaccatctattaaaactctaaataagttacgtttagatattcagcattcttcaatcaaagattcagatgtctcactatcaatatatgcagattatattagtcaattgaactcattgggtttaagattaccaatggatatcatgctcagatcaagtaaattagagttttcatggagtgaaattgattcaagttctgatggtgaatatttccaacaaaaatcaatatcatatgaaaaggcatgtattttattcaactttgcagcatcttatttgtatttaggtattgattcatcatctagaattgattggaaatcatctgtatcttttttcactaaagctgcagggatattcgaattcatatcaacacattttttacatgcaccaactgaagatttaaaagttgaaaacattaaaggtctttacaaattatcacttgcacaagcatatgaatgtttcttttggaattatatgcaaacatcagaaaccaccaaacattcattagctgctagattatctgaaggtatttctgtaattttgaaacaagctaatacttattttgataagactagtatcaatttaggattcaatgatttaattgaatttaaaatcaactatttccactcacttgcattatatcattatgcacaaaactatgccgaacttaataaaattggttttggtttaagagtattaaaatcaacgaaaatttacacagcaaaatgtattggattaaagaataaatcaaataaaaaaactgttttagaaccaactttcattcaacttgcaatcgaattagataaagatatccttgcgaaggaaaaagaatgggaaaaagataacgagttaattttcaaccaagttttaccaccttcaactgatgtcccaactataaaagcaatggatccttgtaaacctgttgattttgagaaccatttaaaagagtttggctgtaaagacttattttttaagatcataccaatggaagcacataaaggtatgtctatttattcagaaaaacaagctgaaattttacgtttatacagtgaaaaggttctcatagctaatcaagaaataaagagtgtttttgaattttcaaaattaccttcaagtcttgttgaaatagaaaatttatttagagattcaaatcctgttctcaaagaagaagacagagagaaggaagttgaatatcctcgtgttttagccatggctcatgaagttgagtcatcaaaaagtgtggactttaagttttatctaactgaaaacaataataagaaagaacaaataacaaagtcattttcaaaagctgacgagttacttcttcaagatgagaaaaacatgttggtgaaaggtttacccgaaagtactgaattgtactcattgaaggagaaaattacaaaacttcgtagaagtctgatggaagcatctatcagtgattccaaactcgagagtcttttgaagcaatacgaagaagaaattggcgttttaagaggtggtacagagagtgttcaaaagtggttagacaaatcagataaggaatctacattagttcaacaagtttcattattagatttagatgacaatgactccaagtcttcagaatttgataaaaagacagcagaacagttaataaagacaatctattccaacaaaaaatctcttgaacttttaatagatgaaagagattctactttagaagatttgaagcaaataatgcataatgaagatatttcatctgttctaattaagtataacaatgcatctgaaggagagttagatatactatttaaagaagagcttgagaaatattccaattataccggacgtgtagacgccctcatttctgcacaagatggaatgatcatcgatttgaaagactcattaagacatttacttgacctggatgtgataaagaaaagaacggaagaaaagaagaaggaaagaaacactatcagatccagactctctaggctaataaatgcttatgatgcgtggaaactttgtgcaaagggtattccggaatcaaactcattttattctgctttcactgaacaaacaatgaaactcgttaatcaaattcatgatattgcgaaccaaagagacttgaatgtatccagaaacagtagtatttctagtagttatacaggaaacttgggctttggaggctacaccagaaacaatatcgcaccaccacccccaagttatgatacatctacaagttctggtgttcctcctaatgttccagcacttccttcgaagcctacaaataccggaagtggccaaccatacactacaccatcagtttatgatcctagcatgtattcacaatttggaaaagactggaaataaaataatgactgtgtaggaaacttaagcaatatatattatataggatctgtgtaaaattttttgtaatattgctgtgatataagtattttttctaccacagtgaaatatttttttttccgattgatggttgaagttgattgaaaagtttattaatgctacaactaaagtcacatatagtacgtttgttttctacaattaggacgaataaaatggctgaaagtatacctagaaagtcagaactcacaaagcatgataagtggagaactggagcacatcaaaacttcgaatcaacattgaaacccgatgaaatacctaatataagggaaaaagagtcaccattgggtgaagaatggtgtggaatattcgaaactaaagttgaattcaagacacaacatttcatgactgcaatgtctaatttaatcgatagtcctaacattaactcaactgtcatacttagagctgatattttacgtagaaataaatttatttatttttcagaaacagacgaaattaaaacagacaaatacgttagtccaaatatcgatgatgaacctttattaacagaaccctgtgaagctgttctaactactaacttaaatgatacagactttaggaaagttccagtatctcccgattttaaacctcttcatgaaattgttaggagaatgataccaagaaacccatcaaaagattatattatcaatcaaacgtgttatataatgtcaaatgttaaaacaaattcaacattagttctttacacccctaatatctctggtccagaagaaactccattttatttaccacctgcaaaatctattggtatcttattcaacggtaacgagtccactttatccatcgcttatttaccttttgagtcgcaagaccccaatattttcaaagatatgtcaccatcagacagatcaattagaattgcttatagattactaagtactgcaaagaaacattcaaatggtgtaatgaacggatataccaagcgtgttaatcacgatcaagttgttccaaaacaacagttccaagatagatacattttattgaaacaaaaatatgcaaaatttttagttgataattggtgtgaatcaactgatccaagaaaacacgtctttgaagatatagcaattgctgcattcttgattgagctctggactctgatatatccatcaaggcaaagttttgagtttcgtgacttaggttgtggtaatggtattttggtgtacattttaataatggaaggttataaaggtcaaggtattgatgctagagctcgtaaatcatggggttcattcctgaaaatattaaaaattctttgaaagaacaagtcattattccatcagttttattaagaccacatccactccaatatgcacaaaatccatgtattgttgataatgaacaagaatggaaggttcctatttatgataaagcacaacatcaaggtacagttaaaaatagtggaaaaaatgttcaattggttgaatgttatacaagtgctgaattattgacagatccacaaattaatgttacagagttccatccaaatacgttcatcattggtaatcactcagatgaattaacatgttggattcctttattaggatatccattcatggtcattccttgttgttcacataccctttcaggtgatagaactcgatatcctgttataaaaggtcttaatggtagagcatcacaagatggatcatccacatatcaagggcttgttgatcatgctgaatatcttgcaattttatctggttggaaagttgaaagggaaatgcttagaattccatcaacaagaaacgcagctcttattggatatcaaagaagtgaatatgccgctaaatcaatctacgaaattattgcaatggaaggtggtgcccacaaatgggtcgaaaatacaatggctttaacaaagaaaaaaccaagagatcactagcttggagattaactctttgcaatttattagtatacaggtacatactttagttgaaatccatctagtagattttcttttatatagaatcataataaatagaaacaatttgtaattttaaaccaacatttattcagtaaatttattttttaccttgttttctttgtctacgtttcttaccaataatttgtttaacttccatggtaacatcagcactcttattttcattattagaattaccggattcctttcctttatttccaacatttggtcctttattcatattacctcttttgtttggtttaccattgtttttcttttgtcttttgttaccatcacggttatcattatttgatcttttatcaaattttttatcttttccatctctatcatcatcgcttctctttctttttggatcaaacccactatttctacttttcattatttgatcatatcttcttttgaacaacactagcattttcaattgcaaattcaacaactaatcttcttttattgatagtcttttctctttcagccattcttctctgttcttctgttaaaccacaaacaatttcttgtttagtgacttcatgggcatttaaccatcttaatgccattaaagcattcttatgatccctgaattccaagaaaccataacctctagatctaccatattcaccagaacctttaacttcattaataactttcgcttgtgaaacaacaccatgtttagaaaccttctttttgtcatcatcatcagtgatacctaatttttccaaaacaaaatgtttatgtttagtagatctatcaatttcttctttagataatggttgtcttttaccttctttaacttcagttgcgaaattcaacaatagcttttctacccaactgtttgaatgatttgtcattcattgctcttggaagatttctaattgccaatctagtcattgataaatgtaaaccagggtttttctttaactgttcaagacgcaaattaaaagatctttctctgatatccatatcaccttgacttagtagagttgccaatttggaattagggccaattctaccttcatttaaaagatataagtttcttttatcattttctttaggaactcttccaagcatttcttttctattatttgcactcttctcagctaatctagctgcagattctctatcaagagaagggacaatttgcataatacgtccttcgtaaacatagaatggactaacatcatctggcaataaaacagaatttggtgaaacagctggtgcatttaaaagacattcttcatatggggtatttttagtaaatgcaacaaatgcagtaccctttggtaaaccagtttccttatcaacaacaggaagtgcatgtttgactggacctaatttttcgaaatgagcttttaatgattcttcagtaacatcatagggtaaattacgtactaaaaacagagtatggttcttgtctattccttttacctttttgttgtttaggttcaatatcttcaaattcaagtaattttgcatcttcttcattgatattgtcctcttcttcatcctcgtcttcctcatcatcatgatcattattttcagcaatatcttcagcattttcttcatttggtgtttctttttgattttcagagttatcacagtttacttctttttcttcttccttttcatcctcatcattaccatcattatcactttcaccattttcttcttgtttagtctttatagtatcccaatgagttttattcacagcaaaatcaacggcaacttctctaccattaattttcaaacctgatgattctttaacagccttttctgcatttacatgtttagccatagtaacgaaagcaaaaccacacattttaccatctttcttcttaggtattttagcttctttaactggaccatattgtttgaaaagtttgactaactcaccactatccttaagattccatggaagatttctaacaattaatctggcagtctttgtcattgcaacatcttcaggttttggtgtatttttagtacttgctccatttgctttaccttcttttctttctcttcttttggcaacatcaactcttaataatctgtcatgaaatttattcttctttgattcattcaatgcaattaaagtatcttcatcagatgtgaaagagacaaaaccaaatccacgtgatttattttcaccatcattgacaataactgcatgtttcacgggtgcaaactgcgaaaagaattctgaaagttgatcatttgatacatcaaatggaatcgaacgaacaaataaagtttttctatctaaagaatcatctttaggtgcaacagtcttagtatctgacattgttattgacttctattcttactctttaaagttaaaactgacaccaaatgaaagttgaaaaatttgggttaaaaattttattttttatcaaaccaaaaaaatttatcaagatgaaaaaaaaaaaaaaattaatgtcaaaatctgaaaaaaatcaaaatttctcaatttgcggaaccaaatctctttaataaaaaagtcgtgttttgtttacatgacagttggttttgaaaatcagaacgattgtttcagagttattgataacaataactctttgataaagggatagttggtatatacttgtgcatactaaataagtctatgaagatatcatgcctccaaaaaagagaaagattacaaactccgggattttatcaaattcttatatccctccattaagagcttcagagattgaacgtgaattacagaaacttccggcagattcattatttagtttgacccaactttggctaacaatatcaataacgcaaccgagtttgagtaatcaagataaagaagatggatacacacgacagtctttatcggaacaatatttgaaagaactcgaaaagttgaaaaagattaaaagtaaagcacaactgaagaagaaacttgtcaatttgatactagtaaaattctacccaaacggactaaatactttacagcttgcacaaatagatgtacaattgcttgttgataaaccaaatgtgaatgcatgggtttcttcaactgccaaaattgtaaattcagtagataagataccaaaagaaaacattgatgatttgaaagatcaaacaagaaataatattataaatgaattatccaattttacctttaagttgaattcacagctgtttctagagaatttcattacaagtttatcaaatttatacctcactcatgtttatatttccagacacccttactttccattacttttgataagagtacaaatgtatgattattcgaatccactgaaaaccaatgtgaaatctaaaaacttacttgcagatcttactaatgttacattggaccgaactgctaaaatggaattcgaaaatagttttcaaaatattttaaacaaccgatataaacaaaattactctgttggaaagaagaaagatacaagtttacagagacaaataaaaatacacaataaaccacaaatcagatcacatcgcccattttatattttattacctatttcatcaccacatattattcattcacctgcattaccagaagatctaagttccaaattgattttacaaaccttagaaagtacattatcacactcatattcatcaaaaggataaagattcaaaaaaaggtaaataaagatcaaacaaccaaaagaaccaacttttcatcaacttcatctaatattaaaattatgattttcagagatgctgatattgtcaaccctattcgtaacttgagtacggtttttcacaatcaaaggtatttcaagatttgcatcagcattaggtgcatgggggccatatgctcaaaacattgttgatattggagttttcgaaaaagaaaataatcatttgataactaaatcctgattcattcattgagttagttaacaccgacgagaatgatgatgatcacattaaagagaggaaaaatagttcgcagggttgagattcaagggtagtttaactaaaatgaactctaatggtgtaatgaatgttaatgggaggccaggaaatgccggtaacggtagcgtagttattttagattctgatgatgatgacgaggtagatgatgtaaataacagcaatgaaagattaggattcttggagcaagagaaggaaaggttgaaagatccatactgcatcacttgtgccaattcactgagaacaacttctatatagaagatgatctttctgaagtttatgaataagagaagaaacaaaaaagttcaaattaaagatcagaagataaaagtgggtatgtaattattgggtaacgatatatttggtggattacatgaagttagcagcaagaggtgatttagatcctttatagtatgccagattggcttactggtgaatcaggaactgttggtggtaaagtgatcgatagaaaattagtaaaacatgtataatattaagaatttatagagcagtgtataatatagttagaggaatatggatttatatatttttattttttgatgagtttatacgtctgattcaattataggatcaaagctacggtgaacaatttcagatatagcttctgaactgaatataggaaatgtaggagcaagtagtttttgtggaggcgaacatcctgttagttctagattcacgacattactttgtttcgtgtcttcaaaaggatcatctgagaatatgaaattaccagccgaagaagataagatgtagtcaaattgctgtataggttttaattgatgtcgtttattattgttggtgattggagttgatatttggttgggtatactctcaaaggagctactttgctttcttttcaagtttgttaactgagatacctgtaataattgtattggcgggtgaaattcagcttgtgatcgctgagaatagttattgattgcaaaagtgctaaaatttgaggaatctatacttgaatctatcaaggtcatgtcacttacataactattttcattatccatttgaaattgtgaatcttcattcaactgaaataggttatttttatctataacatggcacatacaagcatcagctaaaaatattttttgagcaaggtcaatagaatcatcagaattttgctcggagttgatggtatctacatcagtatcattaatatgagtgtacaaatcaggattgaacattacatcattggaatcacctttcagacgggttagtaatttacgtttaactcctgaaactatatgcaactgacgaacagcagccactgttgatatataatctctcgacattgtctctaggaagaagattatatttgactgatttttgaacattttataccgaccctgttatcataatcaattgaaaagtaaacaaaaagccgagcctccactttttttatttattattgccactcacgtgacattgcgctaccatgtgccgtaccacactcaaaattacccaattaagaaattttgctgattttgcatgaaatttgtgaaaattacccagccattgatgatcattgtcagaacacattctattcggaatatgctttttcaggtataatattcctaaatactgtttctattgattaaattgtagttatatctttagaggatgtcccagtgatgatgatctgggttatctttatctatcagtagtagtgttttttctcttttcaaattttcatattaatttttcttttctttatcaatatcatttagttaaatattttctttcaattaatcatatttaaaattagagctatcattttatcaaaatgatgctaactaggtaagggtaaaataggttatgcttctaaaatattcctcattgagaggattactaatatctaattcacgtatgattatcaagttcaaataatgcatcttaaaccaagaccaactcatataaatcaagcatctgctgctattgatactaatattagaccaaaaatgaccaatttatcacaaatgtcatttccttgtcttgaaaaattagaacaacgtacaaaagatttagaaggaaaatggtcctgaacctgcttattccaagataacccgtgaaaatgttgaaatttttcaatcaaatgatcctctattcctcgattatggaggttatttaccacagttcgagattgcttatgaaacttggggacaattgaataatgataaatcaaatgcaattcttttacatacaggtttatcagcttcatcacatgctcattcaactttgaaaaatcctaaaaatggttggtgggaaggatttatcggtcctggtaaatatttagatacaaataaatatttcattatatgcacaaatgttttaggtggttgttcaggttcaaccggtccacaatcacttgatcctctgactggcaatccttatgcaacaactttcccaatattatctgttaacgatatggttagagctcaacatcgtctgattaaagaacattttgaaattaatacattatttgcatcaatgggatcttcaatgggtggtatgcagtgtcttgcttatgtatccgaatttcctgatgaagttaataaaattataagtatttcaggttgtgcaagaagtcatccttattcaattgcaatgagacattgtcaaagacaagttttaatgactgatccaaattggaataaaggtcattattacggtcaattacctcctcatactggtatgaaattagctcgtgaaattgcaaccattacttatagaagtggacctgaatgggaacaaagatttggcgttgaaagagctgatataactaaaaaacctgcattgtgccctgatttcttaattgaaacttatcttgatcatgcaggtgaaaaatggtgtctggaatttgatccaaatagttttctatatatttccaaagcaatggatctatttgatttaggtctaagaaatagaacgaaagcttttaaatcaagaaatcaatcagaagatatttattttggtgcagatataaaagattatgaattagagtatgtatcaaatgattcatgtagttttactaaaccaattgaaactaagagacaaagaagatttacacctgaagaatcaaaacaggatttattacaaggtctaagtaagttttcaaataaggatattctagttattggtgttgaaagtgatattttattcccagcttggcaacaacgtgaaattgttcaaatgttacaacaaggtagtataaataatggtggtgatggtaaaaatattaaacatgttgaattaagtgaatcctgatagtttctatggtcatgatactttcttattagcattggatcatattggaggtcctgtcaagagtttcttagattcaaattaatattaattataccatttacatttttcctgttaacaacttattttatctcctttctttcttctgtcttattaaacacatttttttattaccgcttaaattcttttctataaatctatataaaccaacatttcgaaattatacgcaaaattattaatatcaagttttgtaccggagatcatcaaacaaatttataacatgataaaaattataatgaaaaaaaatcgaaccgtattttttaaaaaaatattgatcgatgatgttatacaaactttttctttttttattaattgaagtaacaatccaatgaccaaaccacagaaaaaaactaaacaagaacaatacactaaatacaaattatcaaggaataaacctaatgcaattgatattattcacttggaagatccaaaagttacaaaagaatggttttttgaaaattatataaaaccaaggaaaccaacagttataaagtacaatcccaattccaaaagttttaaagtaaatacgtcatcattcaaacctgagaatatacttgaaacattaaaatctaacgaagatgatgaaattgatatcgatgaattattacaggttgaagaattaaataatggtggatttggttcaggtaatagaagattgaaaatgaaactcgatgaatttttgaatagaattgaaaagggagagtctttgtatttaactacacaatatactgaaaatgatcctgaaaattgtgaagacaaggatgaagaaaatgaagataatgctgaagaagaagaagaagaagaagaagaagaagaagatgatgatgatgatgcaggatttgcaaacttaaatgaaagtgatgatgaatttacaaatgatatgcacgatgattttgaagaagaatttggtgatgaatttgatggtgaaatggatgaaactgttgaaccaaataagatatatcaatcaccattagacagactactacataataaattaggccatttaccaccacatgcaactgaaatagttgaacctttaataccacaacaaatcaatctctggtttggtcgtacaccttcagaaactgaacaacttaaaattgaaaaaggttcatctggtgaaattttgatgaatcgtggattacctacaaagaatagtacaagtacgggattacaccatgatcatgcagataatttatacgttttagttcaaggtaagaaaagatttacactattttcacctgatttcgcacatcatttatatacaactggtgatatacgaatgatttatgatacaggtgttatcgattatgttagaaatgaaaaagctaagaattggaccaatgtacgtgccgatggtggctgcattgaatcagaaaatgatgaggaaaaaaaatgtgatagcagtgatagtgataacgaaataaagcaagatccaccatcatttactaaaatcccaccagctttgttacatttggatgaagctgataaatctcatttgaatcatttagagacttactctaaagcgaatttccctaagtttcatgaaatcaaggattcatcagctcaagtaaccttggaagatggtgatttattgtaccttccggctggatggtttcatgaagtcacatcatttggtgacgatgaaaagaataatgttcatgttgcattgaattattggtttgttccacctgatggtgaaagtattagtagaccatacactgattctgtttggaatgatgattttgaatctttcaaagaaacatatttgtaaataaactatataaaccttaatacaacactgtactttgtactttcagaggagacttaaattttaaagaagaggcatattttggaggctcgacaacataatatttcccactataataagaatgtttgctggaaaaatattttttaccgctaactgtcaattttgtaaaaggtcactactattgatggaagaataaatatacacacaaatctatatatgagtacatgttaataagacaactcagagtttggacatacagtttatacaaaatgttagatttgaaaagaaatgataataatggtaagaaagttatttctattattggtactacgggtgttggtaaatcacaacttagcattgaattagctaaaagaataaatggagaaataatcaatgcagattcaatgcaaatgtacaaagggttagatcaaataacaaataaacatcctattgaagaacgtgaaaatataccacaccatgtgatgaatcatgtaaattgggatgaacaatattacattcatagatttcaaaaagaatgtaatgcagcaatggaagattgttggaacaggggtaagataccaataatagttggtggtacacattattatttacaaagtacgttatttaataacaaaactattggatctaatgaagagtttgttaaaaaggaggaagatgatgggaatacaaggagtaaaatgacagaggagcaattgaaaattatagatagtgatgataatgaactaatatttgagaaacttaaagaaattgatccgattatagcaaataaatttcaccctaatgattatcgaagaatcaaacgtgcattagaggtatcgtttgtaagaggggtgaaggcaagtactatatacgaagagcaaaggaaggaaagtttgaatagtggaactagtttaaaatatgacacattatttttttggatatattccgaaatggaagaattagatcaaagattagatgaacgagttgataaaatgatgcttaatggtggagttaaagaattaatagacttgtataaattttgtttggaagaaaaaagaaggggtaatgaaagtgttgaaaaaatggatgttggtatatggcaagttattggatttaaagaatttttaccatatttagagaaaaatggaactaatgatttacttgatattaataatatagtgaatttagaggaaagggatgaagccattaggaaattgattaatgaagataaggaatttagtaaatgttgtgatgaaatgaaattgaaaactcgtcgatatgcacgtaaacaagttaaatggattagaaatttacttggtccagaattacaggaagaagaaaacaatggatttgttaaatttggcaaaatgtttgtcttagatgcgactgatctgacaaaatggggacaaagagtcggtgagagaggtgttaatattacaaatgaattcttatcaaaggggtatgttaatgataactgtgcggaattagcagcaatacctacaacattatgtcatattgataatttaattaagaaaaatgatactagttcattaaataaggttgagaattggacacatcatgaatgtgaagtttgtagagatagagagactaataaaccaattgtttatgttggtgaacagtgggatattcatttgaaatctaagaaacacaggtttaatttaaacagaggtaaacgtaagagagaatatgaagagtggttgaagaagtcaaagaaggaaataatagaataaaagtttattaatgagattcggtgatccccgcaacaaagatctgtttctttatctcgtaaatttttgaagaaaaaatttaaactgttatcgctgatatcattttaatatctttgcattatgattgtctgattacatatttttgttcgagtttaatttggttttaaagataaccgattaggaatataaaatttaactgtaaatggaaatactatacgataaataaaaaattgattagtaaaatataaaagtcattaaattagtaaagtcaaaaaataaactattttagattaattaaattagtaaggagcaagttttttttcatttgaagatacatgaggttgaactatttgatcagcatcttcaccaacaatgacaccttcattaacattactattattattaacctttgaagctcttgaagtgaaaggacttaaacttcttaaagtttcttgaattggatgaggatgttgttgatggaataattgcatttcttcatcaacttcttcaatatcatcaatttcatcttcttcttgagcaattaataaatttaatataacacctaagaaacctgcaagtgcgaaaccttgttccataactaatgtaattgcatttaagaaaccttgtaaaccatgatttggacctgcataagtgaaaaagaattcaaaccaatttggaactaatgttgaaccaagaccccacattaatgaacatgtaaaaacaaaacgatcacgtcttgtaaatggagttgttgaaataattttcaaacctgaaactgcaactgatgtgaaaaggaatgttgtcataccacctaaaactgatgaaggaattgcaactaatgcagctgcaaatttagagaaaactcccataacaattaaataaaaacaacaccaataaccaacagttcttgaaccacacttagtaattgcaataacaccattattttgtgcaaatgttgacattggtggtaaagtacataaaccagccaaaataccattaagaccatcagctaagataccaccttgaattcttgaatcatataatggaccttcaatttctaatcttgtaacatcatgaagttgcagtaatatcaccaattgcttccatcattaaaaccaaataacaggctaaaaatggtaaaactaatggaccataaacttttaatttaaaagtatgtacccaaataaaagttgcagcaggtgcaacatcaataccagcatgactgaaataaccacaagcagctgcaacaatacaaccaattaataaaccaacaataacagcacaatgatttcataattggagacccccatttttcacaaataataataacaacataaacaaggaaacctaaaccaataaattgagctgaaccccaagcataaccttttgcacaagtacttccaacacaacctgaaccaccagctaaatcttggaaaccagtttcaacaagggatacaccaattaataaaacaacaggacctgtaactaaaggtggaaagaatctttgtaaaatttttgcaggcatgaaggataataaaacttctaataaaccacaaacacaagaagttgcaataactgcaccataaccatctggacaaggtaaaggagtaccatcagcggcagaaggacaaaatccagttctatacatcattgggaaaccttttgaaacaattgaaatagttgcgaatgagacaccaacaactgataataaacctgtaccaacataataaggagtgaaagggattttaaatcttgtaatttggatagcagaaagtatacctgaagttataagtgaagcagagactaaatattgagtttgtatagtatctaaatgagcaaaatttgagattaaaattggaggagtacaaagaccagctaacatagaaagagcatgttgtaaacctaataataaacctaaaaaaattggtatatcatcattaagaccaaagaaaggttgagttttctttttagtcatatatggtaaagttggagtaaataagtaagcataatcataatcacctaagataccatcttttgtcgtacattttttaaataatcttttaaaatcatcctttggattaaatttaaaagtaccatcattttggaatccattagaagagatatttaaattttcctttgtggaagaagattgagaatgtgaaatttccagatcaatttccgttggagctttattatctgaagatccttgatcatttgatgagaattttggtaatgaaaatcccatcttgttgattatgaattgtttaatgataaattgaaagaaaaagtataatagtaaaaattaaaaacaaagaaaagtagaaagtaatttgaatttgaaaattgaaagaatgtaatcaagttttatataaataatttgaagtgcaaatttactgatgagatgtagcgataaaacaaaagataagaaaagacaaaattacagataaaataaagtgaaaaatgaaaataaaataaataaaataaaaaaaataaaaaatatgatccaaatagattaaattaattaagacataaatcaagataagagaagataacgaaacattgcagtgacttctcaaaaggaaaaaaatgaaatttttcggtgcggcccgtttcacaggcgttttcggtgttctccgtccaattaaaattataggatgcggattacgtaagagtgctaatatagttataattaattattgagaatgccatagttatttaaccggttgggtggtatattaattatattattaattataattaactgttcatttcatgcatcgtataaatatcatatgtataccttatacagccctgtcaaactcttctctctttcttttaaagatggagaaaatctgctgcaactagtaattcaagtgccattgcagttggtaatgggaaatctggtatatctcctgatgatgtaccacctgttgcccatttattattataacataaatattctgcaactttctctaatactggtccatcaagttcatgtaatgttattgtaccggttacaccttcttcaaatgcttctgaaagcatactttgtaatgtaccactagctgatgcagcttttttactaacaacaactcgatatccatcatttgcaacaagtgttacatattcactcatattgtatctatgttaagagtattaatagtaaagggaataatatatatatatatatgcagcttaataaaaggagtttcttagtcaaattgttaataattatgtaattggcaatgttccttattaatatgcatgtttttttttacacgctgtgtgtatatatatttttgattaatagtagcaaattcctctttttatatgagaaacaaaccaccaataactaatcaatgttaactaacccatcattgaaatgggaacctttagatgatgtattctatcgttcaagattatgttatgaagatattaaattaccaattcaatccaattttgatgattataatatagtaattggtccttcatcttcagttttagcaatttatccgaaaaaacattctccaatacgacattcacttgataatatattaattacaacttcaaatggtgatatattacactcaatatcatgggattttaatcgtatacccatatcatcaattgaatggactcctaatgctgaattattattagttttatcatcgggtaaatttcgtttatattataattataccggagattttaaagaatattcaatattagataatgataatgataatgatgaaactgataataatgaaactattatatcatccaaaatatcaaattatacattagctttacaaactaatcttaatgaatttataataatcaatgatataaggacgtccttcaaggaaacaatcttataaacaattcaaaactgattcatcaattgatccttatcatatatctacttggaatattttggatgattcgattatattatcaacatcttcatcattatcaatattatcaaataatttaatttcaaatattttaccatcaggtgcatatacaaaaatttcagtctcctataatcattcattagtttcattattaacaattgataacaaaattgaaatttacaattccgatttttcacaattacttcttactttaccactatctaattcacaagtgctagatatacaatggtgttcaaatgatgtacttgtattatcttatagtacacatttaataatattgggaccatcgaatgattcaatttcaatattaacaaattctaaacctttactaaaatcagaaactgatggattgttctattttacaggtgatcaattattttttttctccaaggtaaacattattactgaaaaaatatttagaattggatcaactgatccagctgctattttattagattcaattcaatatttagataatcattcaccaaaggcaaatgatttattggatttaatttcagatcaattaccaaaggcaattgatgattgtatcaatgctgcacttgaagaatttgaaccttattggcaaaaaatccttttaagagctgctaattttggtaaaattaatttagatctctatgatccatcagattttattaattcctgtaatattttaagaattttaaatttattaagaaataatgaaattggaatatttatatcatataatcaatatctttcattaggtattgaaaaattaattgattggttacttttgagaaatttacattatttatgtttgaaaatcacagatttattaaatttaccaaattataaaattaagactcattgggcttgttgtaaactgaaaaattctcatgatttaaatgataatcaattacttaatttattagctgataaattgaaaaatgataaaatcgattggttaaatctttcaaatattgcatttattgaaggtagatttcaattatctaaaaatttaatctcatttgaaccaaatactggtaaaaaagttcaatttttaatttcaattcattctaaaactaatggtgatgaaatgttatatgctttaactaaagcaaatgaagattcagatgctgattcattattgttgattttatttgaattatttagttcactatcaaatattgaatttttcaaagcaattaatgataaacaaaatgcaattggtttattgaaatcaatacaatatcagcaaagtagtacacttttaaatgatttcatgtatcaagatgatgatatttatggattaattataatatatttggagaaacatttcataaataccgataaagtcaaaatagataataaacactatacccatattgaaacattatttactaaattcaacaaatctaatactctattgagttcactcgttaccaaatacaaaacatcagtcaaagttgaacttgatctaaataaccatcaattagaattatccaacgtatatccaacaataaaaccaggtgattcactgtttaagactttatccgatatagtggtggttgatttgaaggttgcattatcatttgctaaaaagtataatatttcatcaaatcaaataataacaacagttttacaatccttagctccaataacttctaaacatgcacaattatttgaatttgcaacatctaattcaattactgaatcatatccacttgaaacattttattatcatttatttaaattaaatatgaaacgtcaagcatcaatgtatttaccttattgtaagcaaatgtcatataaagaaaaaataattgcttatataaattgcgatcaatggaaagaggcagttaatcaagcagctggaaagaatgatataccattattacgtcaaatgagagattcacgtataggtaatgatgctaagatagcaaatgatcaaatcgaattaattacaggaaagagagaaagtatataaaatatgtaacatttcaataatcatcttcttcatcactaaattcaaatccattaatgtatgcttcacgtaaattatcaagagtatcctttaattcttctcttttatcattacgacaatatcttgaaacataatttttcatattggtgaaatcagttttcaaagtatcatcaacacttaatgaacttgcaagtggttttttcatctttcattatctcaggcattgaatcaacgtattcatattcatgtcttaatttatattcattaattaaatattttggtgtattatctgaacatttactaaaatccttacaatcttcaatagacttgacaatacttttactaaaaatatgtggttttctttgttgctgtgttatgaaaataccattaactcccattttctgaatactgtcatcattccataatgtgtcaatattagtaataaaaatttttgagcttgaatctgttaatttatacataatttcggtaagatcacagtttaattctacatcattaaattgatcataaggaactgataaaaatgctgttttttcccataaactatttgaacctatatcaatatcaagattcatcattactattcctgataaatctaagtttgcaaatgttattagtttttcaattctgtccatcttactgactaaattcatatcatcaacatattttgtatctctctgtaatgaccataatacgatttttgatgatttaccatctaactgatcgtcaattatatattttaatgattcagaacaaacacctgaccaagaagaatctaactctacaacactgtttagttgattcacattcccgctattttcaaacatctttctcacaatatcatcgacggaatcacgtattttattgacattattaaatgattcaacaccaatttcatgtaattgaaatttactatcaggtaaattcttcccccttccttcacctgtttgttcatcatagacataggtaggatgtgttatcactgcatgtggataatatgtaactttactgaaatctgaccaataacttgttcgttgtccatttataccattaccatcaattataccattttgaacattcttttgaaattctgtcattgaaatacttggtaatgtttggattatctcaaatgaggttttaatctctggtttctcttcaaaataagtatatggatctaatgcaccactaccgtttgaataatcatataatatacttcgtggatataaatttgaaatagttcttgaattttgattagattttggtaaaatatgaataaatgcatctgatcttgatggatctcgaaaaagtctagctgattgagtgttattaaaatgcgttgttaattgattagcacattgtgaaaatgataatgtgattgtttcaggcattagtggttgttaacttttcttcaatgtagccataaggaaatccatcaatctttaacctgaataaattgaattagttgtgattccatcttgatgattacgtaacaattttttgattaacagtgaaatttttttcattagaaatttttttacatgaaataattttttattcttgaaatttataactggaactttgtttaaatctataataagttcactttcaataaaggttggaagcctaagtgacaattaaaataaaagattaattatggggaactcattagaagaacgtttacaagaacattccaatgcatttaatggattattatcacttatacctgcaaaatattattatgatgaggatacatccaaccaatggcaacaaaaacgtaagtcaaaggaagagcattcattaaataagaagaagaaacttaatcctgaaaataacaaaaatgtttcggcaagggatgttttaaatgaaactgaaaaaacagctacccctgttgttttaccaggtgaaaaattaagagaattattaagaagacaagctgaagctgacgaagcaggagatgatgatgaagaggatgatgataatgataatgacgatgaagaagaagaagaaagcggagatgcaaatgaagattcagaaaaacttattcaagaaaatgtaactattgtatttgatgataatggagatactgttaccgaggaagctgaatataaaaaagctgaagtacagaaaaatgcaaaagcacaaaaaggcaagaaagtactcacaaaggaagaacaagaagagaaagaaagaaaatacaaagaattaaaggctaaattacaagctaaaattcaaagtatgagagaaaaaagaaaagcaccaggtagtaaagtaccaggagcagcaacatctagacaacaaattcttgaggaaagacgtagaaaagctgaacttaaaaaagaaatgaagaagaaaacagtagaagaagaaagtagtgatgatgaagttagtgatttaagtgatgttgaaaacattgatgaaagcacatcaaagaaagatgtgaatgtcatgttcggtaatattgaatttgcggatggtgaaagagtttcaagtgatttatcaactactagaagagttgaaaagaagaaggggccatcaaataatgatataaagggtcatttaaagaaaattgagagagagaaggaaagattacaagatcttgataaggattcaaagagtaagattgaagataaacaaaaatggcaaaaggcacttgcaagtgtgcaaggattaaaagttaaagatgatgaaaagttgttgaaaaaagcattaagaagaaaagaatcaataaaaagaaagagtgaacgtgaatggaaagatcgtatacaaaccgttgcagatgagaagaagatgaaatcagatagaagagatgaaaatcttcgtattagacgtgaaaataagggtaaagatcgtaaacatcaagttaaacaactcccaagttataagagaagtcgtgctcataagaagcttgcaggaaccaagcgtgctggatttgaaggtggaatccgtagtaaaaccaaaaagtaagttttttctaatcaattaatttataaataataatacagtttagtttatgttatgttttataattatttataatctaaaaccacatagatcctaaacaatttgtaaacttaagaacacagagagcaagttaaaaataacctgaataaaaacctggcttttaattttagaacaataaaaaacggaaattggaaattgcttaattaaggtaatcgcgaagccgccttgtttgcgtttaacgtcaacaaacagcctttatttcgttcatgacaagtttacgtcccttctttgatctcaacatttcttcaattcataggtaatctttctgctttcaactcaaaatttagttgatattgaacattaaagaaaacaacaatgtggtatgtataccttcttaagaaaaagctatcagatttacttcaaaaacatggtatttagataaaaaaaatattcgtatcattaggtttcatcatttaataacctaattttaaatcacttaaatgtcagatactttggacatcatactaacattagaaattttaaaataactttttactctttagtggtatctttggttacgcaaattataatataagtcgtacaagagggcaaatcatcaatactttagttgatggtttaactaaattagaatatagaggttatgattccgctggtattggaattgatggtgataacgattggtctgaagattccccagttagagaaatccaattatataaacaagttggtaaagttgcaaacttaaaggaagaaatcgattcagctcaccctgatgtttctgaaactttttatagtcatgttggtattgcacatactagatgggcaactcatggtggtgtcactcaagtcaattgtcatccacaaccttcagatgttcttaatcaatttgtagtggttcataatggtatcattactaattatagagaattgaagacattcttaaagaatgaaggtgaaacttttaaatctgatactgatactgaaattattgcaaaattatttaattattattatgaaaaagatcctgaattagaattttatcaattaacaaaggaagttttatatcaattacaaggttcttatggtttaatgattaaatcagttcattatccaaatgaaattattgcaaccagaaaaggttcaccattattaattggtgttaaaactgaacaaaaattgaaggttgattttgttgatgttgaatttatcaatgatccaaatgaaaatcagcaaacaacatctgattcaaacggtactttgatagcaccaaaatcaattagaacttcactgagaaaatcggaatcaagagcaattttaccagatcataatattccaattgaattttttgtctcatcagatgcttcttcagttattgaacatactaaaaaagttttattcttggaagatgatgatatagcacatattaatcttggtgaattacatattcacagagctagaaaaagtgaaggtatgtcaacaactagacctgttcaaactttagaaatgcaattagctgaaattatgaaaggtggttatgatcattttatgatgaaagaaattactgaacaaccagattcaacttttaacaccatgagaggtagattagatttcaaaaataaaaatattattctcggtggtataaaacaatatttaacaagtattagaagatctagaagattccaaatgattgcatgtggtacatcatatcattcatgtttagcagttagatcactatttgaagaattaactggtgtacctgtatcggtcgaattagcatctgactttttagatcgttcacctccaattttcagagatgatacatgtatttttgtttcacaatctggtgaaactgctgatagtatgcaagcattgaaatattgtagagcttcagggtgtttgaatgttggtgttgttaattcagttggttcaagtatatctcgtgatacagattgtggtgtccatattaatgcaggtcctgagattagtgttgcgtctactaaagcatattcatcacaatttattgctcttgtaatgttagctttacaaatttctaataatgttattgataataaggaacgtcatgttgaaataataaatggtttagaagaaattccaagacttatttctagagttcttgaacaaaaggaattaattaaggaaatttcccttaaacatttacatggtagagattcaatgttagttgttggtagaggttatcaatatgcatctgcattagagggtgcattaaaaattaaggaaatttcatatattcatgcagaaggtgttcaagcaggtgaattaaaacatggtgttttagcattagttgatgatagaatgccagtagttgcatttgcaacacaagattcattttctccaaaggttaattccgcaattcaacaaattactgcaagacaaggacgcccagtcttaattatgacagaaggtgatgatttaattgataaatctaaaacttctgcatgtattgaaattccaaaaacggttgattgtttacaaggtttacttaatgttgttccattacaactaatgagttattatttatctgttgcggctggtaataaccctgaccgccctagaaatttagctaaatctgttacggttgaatgaatttatattttccatgcttcttgtcttttattattccatttaatatattttctcatttatagcttctgaatactaaaataagttagacgattactgtagaggttggttttcactcgtgtagttatatcatagagtaaactaaatagcctttccgatggagggctacactgtgagcatgcggcgtttgtttttttttaagacagcttcaaaaatttatattctgtctcgatagttaatggagtccctctataattaaatcgatgattacaatagaattttacacctaagaacattactgacaggtgaatcttcttcctgaaatttattactgaaagtttgatttatgtttttacgaaatcaactcaaaacttggtcgttgggtgttacacaaataagtaagaacttaagaataaccaaaagaacaatgtgtcaagctataaaccacaagacattcccagatacatcaattcatgagcagttaccaagaaatgtgattccaactcattatgatattaaatgttatgatatcaatcatattaataatgttttcaaaggtactgttaaaattcaatttgatattttagaagattctaaatctataacattaaatcaaaaatatttaaactttgataaagttactattaacaatgaagaattagaggttgttaaaaatgatgaaaatgacactgtcgaatttaaattaaactcacaagaactaaagaaatcaaataaatcagttgaattaattgttgaatataatggtaaaattcgtactgatatggctggattttatacatcaaattataaagatgaaaaaacgggggatttgaagtatattttagcaacacaatttgaatccacagatgcacgttctgctttcccatgttatgatgaaccaaattgtaaggcaaatttcacaatttctattgaagtttcaaaagatttacaagttttatccaatatgcctattaatgaaactaaatcaatttctgacaaaaaagttttcaaatttgatacaacaccaaaaatgtcaacttatttggttgcatgggcaattggagaatttgaatatattgaattaaaaaccgaaagagaatataatggtaaaaaattaccaattagagtttatacgattccaggacaatcagaaactggtaaatatgcacttgaaactgcacaaagtgccgttaattatttatcaaatatttttgatattgattatccattacctaaattagatttactagcagttccacaatttggagcaaatgcgatggaaaattgggggctggttatgtttagatcaactgcattattatatgatcctgaaaaatccagttcattatataaacaaaaggtttcgtatgttgtttcacatgaaattgcacattcatggtttggtaattattgtacaatgaattggtggtcagatttatggttaaatgaatcatttgcaacatatgtcggatggttatgtgtggataacatgcatccagaatgggatgttttcactgattttatttcaggatcaatgcaaaaggcattagatttagatagtttaaagaattctcacccaattgaagttcaagtttatcatgcaaatgaaattgatgaaatttttgatgcaatttcttatttgaagggtggatcagttgttagaatgattgcagaatcaattggtaatgaattatttttaaaaggtgtttcaaattatctcaagaaacatccatttgataatgctaaatcagatgacttatgggattcaattagtgaagtttcaggtaaagatattacatcattagttgcaccatggattagagctgttggtttcccatcattaaaagtaaatttaaataatgaagatggtggtaaaacaattaagattcgtcaagaaagatttttaactgaaggtattaaacctgaagatgatgaaattacatggtggattccaaatgttgataatatgcaaactaaggaaaaattaatttcaagtgaaaatttcgttaaattaaatgaaaatagtaatggtttttacagagttttttatgatgaagaattatttgaaaagattcttaataaattagatgatcttccagcaaatgataagattggtttaattgcagatactagtgcaggtgcaagagctggaatcataaagacatcacaatttttagaattaattggtaaaatgaagaatgaatcacatgttgcagtttggaatgaaattatcgaaagattaaatacattaaagaatgcattttattctgataaggaaatttctgaaaaattagttttattctcaagagatttatataagaataagtttgaagaattaattaaatctaataaattatcatttaatgaacaaaaactagcatcatcattatttgagcaagcaggtatttcacaatttgaagttgcagtctctaaagcattggaaatttttgaatcaaaagatataaaaccacattttagacaagcagtttatagaatattactttcaaataaggatacatgtaatgatgaaatttttgaatgtatattaaaagaagttagggaaccaactacaattgatggacgtgaagttgcattaagatcgttaggagcaattaataatgttgaaaaatatttaccaagaattttagaattattctttgatggtagtgttccagagatggattatcaatttttaatgataccattagcatcaaatcctaaaactaaagtattattatgggaatattttaagacaaactatccaagatttagaaaagatgtttcaatgtggacattagatcgtgttattaaaggatttttaccaaaattagcatcagaagaactttataaagatattgatttatttttcaaagataaagataattccggttatgaaatgggattacatcaaagtttagatagtcttcgtaatgatgttgaatggaagtcacgttctcaagaagatgttaaagaatggtttactaaaaataactattagtttatgtatgaaataaaattatttacattaataactttaattaatatattaacgtaaactcattgatttttaaagactagatttattaccaggtgatattttagacaaacttctcttattaccgaacgaaacttggaaaaattcctaaaagggaaatggaaagtcagttttaggccatttgttgacatcctattgaaatttggtgatttttttttcacttttttcctttgtagattattttttctattgtttaatttctcggagagaacggaattgaaataggaacagtggctacaattttataggggtgatgagggtagtgtgttaccgtatagtatggatattaatccctcaaattgtgtttaccgtcattggggctttaaatttggtttttactttctggtcattttttgcagaattaaaattaatttatggcatagcctgagggcaaattgcactttcttgttacttggacgtttcttcaatttttcaatgaattaataagatattgttatgttattctttttctggttcagattgttttcttcccatatctctaaacaaagtaattttaaattataataagaatgttaataaaatcattggttttaactagtttattaacagctatttcagcttctccaatttacagaagagaaattgtaaatgatacttcagctaatatcacagattctgaacaatcttcaaattctattcgccaaaacttattatcattattagattttaatgcaatccaagtttcaattggttctgataatcaacaaatcttattgaagttagatactaaaacttcctgatttatgggttaattccgacatcaatgaattttgtgaagcttattatccattcccttccattttcaatagttcaactgttgcaaattttacaaaaatttcaaatttaggtagtgatttacaatcttctattgaaaactcattaaatgaattccaaattaatcaagcatcaagtttacaaaaggttgctgcaccaactgcctctgctcaaatagatgatattaaaagttatgcaagtgcaagaaatcaagaaattaaatcagttttatcatctgataaagctgaaatttcttcaaaaattgaaaaatttactaaaactgatgacttttttaaaactgctgaaagtgatgcaattattttcggtaatgatgttacctcaaagggtgctttattagctactaaaattacaagttggggtggtcaagttgcaactcatgccactcatgatggtgaaaatttttgcaactaaagttacctctgttggtggtgatgtcgcaacttttgctactttggtggtgatgttgcgacttttgcaacttctgaatttggtattgctacaagtggtgcagttcatggttgggataaacttacttccggttttgcaaatgtcgttggtcttaaaaagagggaaactaccgtagaatctcaaaatgtttcaacagccaaaacatctgatttggttctcactacttccactctttcttcatcttctcaaagattatcttccattgcatcttcatcaacttttaattttgttccagaaaaaactctttctccaccttccaatgttactcttatgaatgacactttcttagtcggtagtttaattcacagacttgaacatgattgttccttatttggggtttttgatgattcatcatctgaaacttttaatactatagatgattacttgtttgtttcatcttctgatgaatacgcatttggttccctaggtaatgattcagttgctattggtgatgctgttgttaatactactatcggtgttgctgatgtttcagaatctaatattggtgtttttggtattggtagatcatcaaatggctcaacttttaaatctttaccttacgttcttgcggaaaatggtgatattgaaaaggcattatatactttaaatattggttcagaatcttcttctatcttattcggtgcaattgatttcttagctattgatggtaatattacttctttcccaatgttaaatactactggtgaacaaattgccattactttatctggattaaatgttacttatgggggtgatgattatgatgattatgatgacagtgatgacagtgatgacagtgatgacagtgataacagtgataacagtgataacaattacgactatgatgacagtgatgacaattacgactatgatgacagtgatggctatggaatttctgactatgaaattcctgataatgatactttagttgcagatggtaaggctccagcaattattgattcagcttctcgtaatgttttattacctaatgatgtcttaacttcacttgttgaagaattaaactcaacccttgaaattagttacaatgaaactttaggtagatatgctatttatgaagaatctatggaatcaattgaaaatatttccattgcatttgatttccagggtgaagtgttttatattccattaacaaactttgttattcccgttgttgatgaagaaactttctatgtcaataaatcatcagcagttgttggttcaggttataattcatctttctattttgattcatcagttgctgattatatgtatcttgattttattttatcaattttaccaagtgaagatgaaacagttgttttaggtttagacttcttcagagatcaaattactcttattgttgatttagaatctgaacaagtcggtctagcttatcaatcagatgacgcgattgattcactcaattcactcatcaatggagaaaacacacatgcacaaaacgcaactgattacaataattactatggttccgacaatgtcaccagtttaactgcatattaaacccaaactaaaaataaatcatattattgataccaactatttttctttctattgttttcaaatttgaaaatattaaattcatgttataacatgctattatctgcatttttaaatttattatttatttacattattttctctaaagtccgtttattgttataattattacttttcatttgtataaattactaaaaatctatactaatttatttctacagccgcgttttcaaattgaaaaatttaaaaaaccggaattctcggaacacagtcggagttgtggcatgcatgcacatgtgtgtcaaagcttctttgggacaggattataattccatttctgtagtacaagcccatcgggctacatttataatttcttggtaatgctattttctgatataaaggtaatgatggctgaaaaattaagctgcaggattttattacttcctttagtttaaacattctttctactccattcaaacatcttgaaggatttcaaataagcagttatgaatttcaaacttgcattaatatcctcattagctgtggtaaatgctttaccaactctcattagaagagaggaaactagcaattcaagtagctctttacctggttttattaaacaagatttatatagtggtgtcaatttcaatgctattcaagtttcacttggttcagataatcaaaccgttttattaagattggatacaagttctccagaagtttggattaattctgcattaaatgaatattgtttggcttattatcctttggactattcaaactcttccagctggaatgaattcaatatcgagttacaacaagatgttaaagattcttatgaatcctatcaagctgatgcagcttctgtacttgatcatgcttccggaactgagcaattaagcagttacggtgaagcggctaaaacaaaatattcatcatttttttcacaacaacaagtatctgttgaaagcaaaattagtggatttgttaaaaccgctacaggtgacattccatctagttttgaaactttgggtcaaggtattacttccaaagcaggtgtttttgcaacatctgttactagctggggtagagaatttgcaactgatgttacaagtattggtggtagtgcatacacctttgtcactgaaaaaggtggaaatgttgcatcaagtgttacaagtgagggtggacaatttgcttcttcaatcacatcagaatttggtggtcttacagctgatgttttaggtggttggaacaaacttacccaagggtttgcaagtgcggttcttaaaagagacgaaggtactccaactttaagtattagttcagttgcttatagctcatcatattcttttgtaccacaatatgatttctcaaaccaaacaagcaaccaaacctcagattttgacattgacttggatagtattttcttagctatccaaaatgattgttcattatatggtgtttacaattactcttcttctgatacttttgatactgatgatacctattcaatcttatcttatggtgaagattttgcctctggaatttggggtaatgatactataacaatttctaacattagtgttgattcattaattggtgttgcagatatctctgatacaaatattggtatttttggtattggtaaatcttcaaatgaaacaggtatcaaatcttaccctgatattcttgctgaaagtggtgaaattggtaagtctttctactctctttaccttggtgaatatgaatccactattatttttggtggtgttgcagaagaatattttgaaggaaatattacattatttccactattaaatgttacagatggtttagcaatcactttattaggattaaatgtgagtatggatggtattagtggtagaacaaacaattctgtatctgctcattgacgaaaagactccagcttatattgacattatttcaaatccattattacttcctgaagctactttaggaattacttgttggtggtttgaattctgttttcaatgtcacttatagtgatacttatggaagatttttattaactgaaaaagttgaatcctctactgataattcaacaagttctgatgattcttatgatattagtgatattttacttacttttgatttccaaggatccttgtttgatgttcctcttgaacaatttgttgaatattttgatcctgatgagcttgcatattacaatacttcgactccttactctcagactattacataactcctctttcttcttcaatattgattggaaatactacagatggtagtggagacgataacattgattctgatgatgatgatgttccagaagtttacttattaaatattttaccctagtgatagtgatgcagttgttttaggacttgacttttttaaagatacaatcgcattatttgttgacttggaagctgatgttttaggatttcgctaagagtgctgaagattatgatgtatcatataatggttctgcaatcattgaacctgatgagaaagctgatggtaagtgatgatgactactactatatttctgaagataatgatgaaagtaagccagtctcaatcattttaggttaccgatgaaattccatatgcggtgaaagctccagattttgatagctattatggctctgaaaacaatcattaaaattgttctaaatgttatgagattattatacccgttcttttaattattgattgtatttatattatttcaattattgttgtatattttatcaggctcaaaaaaccttgaaaatttatcttactgtttaaaactatcatgaaattatattaaaatactcttatttatcaacatacgtttatatctacaaaaaaaacgctttaattttgtttgattgatcacttaaaaatataagcaaaaaataaatttttatttctttgataaacgccctgaaagtaatcaattaacagaacttttattttacaaaatttcatttatacaattattttaagtgagtattaaataaataaacaatgtaagatatgtgtcttataattattgtttcaaaatttttttttattgttgcaaaattgtagttattaaaaaccagcttacgtaattcagcagcatgaagatttagtacaaatattttttttcaacaaattccttgttagctcagtcggtagagcgttcggcttttaagaattctttaagaagtcgaccgaaatgtccagggttcgagcccctgataaggagtttaaaccttaatttttttgtttttattattatttgattctttgtacatgatagtaataactgattttttttacttattttttaaattggttttaaagcttattataactgtaaaagttttataaaagaaaaagaacgtagatctataaaggataattttttgtgtgaagaaagttagacatgatgatttctaaacttcgtaatcggtttcaacatcttcatccaagtcatgaatttctattggaggttttgtttcagtgatcttaacagtttttcttctttttccagagtcatcatgaggattgaaatcaaatcttttaggtttgtttatagcagtatataattgttgattcattttatttatttttgatggatttaaagttctcagggtattatttggaacataattagatgcgtggttaacagtgaatataccagttggaggtggtgagacttgataatcaattgccttaaattggacttgtggtgttttgtgtttaagatgaaattcatatttagaattataaggagagctgctactatttgaatcgacaaaaaattttgaatctaaatccatttcatattcaggttttgcagaaagatgtaaaggtttttgcgaagatgtgttgagtgtagacaattcatttcttcttttatttttctcagttgtggaaagaaatggcgattggagagaattagaacttgtgtttgaatgaatctgtggtatatgaatgtaatttgaagtttgttgggcatgcggatctggttttgtaacaatatattccattaaatcattataatatgattcatttgaagaaacaattggtggtaaatgcaacggtctgtcttttgtcaattttgaggtatccattgaaggtggtgttgagaaaacacctgaaaactttgtataaacatctcttcctggggtatcgataatttttgaattagagtttgaactggaagaagtgtttgacatatttgatttactcttatgataaatttgactggagaactttttacctggtttaattacctttagatgattttattgcagagttgttttgttgatcaactagattgaacatatctttcagtatatccatcctccttctaccaaaatcaattttatcatttagtgtgttattagtttccggcccaagtcctggaatgacagaagctgtatagattaaatctgtttgtttatgcttgaagatctttaaaatgttaattaataagttgattctttcatctttttttaagtgatcaggctctctatgaatacaaccatgtggccaccagtaaggttttgaggaatcacccaatttatacgggtacttagattgcttttttggttcaataactttaatccatgctttagctaataacttacaaggaatttgctgaaattcctcaaaacagttatataaatagtttttaacatcaactttatcatgtggatcgattgacaaatatttgtaagattgatttgaagtatatgagtttgaagtagaagaagctcctgttgattcattagcgatggagatattggttttatttgtgctactattatgatcagcagttatatccaaattatatttattctcatttttaggagaggaagtaacaattttatttgaatttactagacttgaaataatatgttgaaattcagaattgtttgaaatattatgtaaacttgaattattgaatgaagcatttggagtactgcaatcaataccttccgtgatcatttgctcaaaagtacgtgtagcattttggaaaaatcctataaacgtaatgttatgtgatttgcaaacttcagcagcaagtgttttaacagcaagaatttgtgaatctaatgattttgtcttatccatcttttctttttgtttaaattacaaacaatttagagataataaagcaaacaacaaaataaaagtgctgatcgtaaataacttacaggtattattatgatatattaatgaagaatatatatgaatgtttattaccaatgtttaaaggacatgtaagttttgctaccatttttatttaataatcaacagggataaatgaataccatggaaaaaaaactttcactaagtaagtttcaaagatgattgagaagtaggcacttaaatgaaacacagcacattctttcaacaataggaatcaaattgatgtgaatttattcacggatatatgtgatctatcaacaagtccgtgaaatattcaaatcaaataaagaaaaagttaggaacgcgtattataagcgtttcatgttggttatgaaaaatcatttatttttgcacggctcaactagaaatatgaaagatgtatttttagcattttagataaggatcttatactgatctgtcaattgatggtatgatcagatttaaaattaacatcttgattgtgggatcaatattttggttggatgatacttttttcggatattttaggaatatatcatagattaaaaaggcagttcagctaatttttttcttacatatctttttgatccacccaagtaatatcaattattttaggctaagaatgttgttgtttcaatctatggaattattagataaatgtatataatgaatggtatatcacaccttaatgtcctcagatagacgccgccaccaattacttagatgggtgtaattacgcgaatgttacaaatatccgatgaatccacacactattatggaattatcatgaaattatggactttcacagattatctttagtttagcaatgataaacattccatttaaagcaatatgagtatcaatggatcagatttagaacagcttgagaaagaactgaatggaataagtataaaagaaattaatgaacatccaaccaaaagtagagaagagatagcttttaatttatttgaacttgcaactgagaaagaaaaaattggtaaattaaatgatgcatcagattactattggaaagcatttaaacttgatgagaaagttgatttaaaatatagagaaaaatattttgaagtacttaaagaagaaaatgaaaaattaaataatggaatgatcaatggtataaagaaagattttgttccaattaaatatgtgaaaccattagaattaaataaaggtgaaattattaaacttttagatagttttgcacacttgtgaatttaatcctgaagatgaagagaaaccagtattaataaataaattaccatttgaagttattgaaaatataattgaaattttaattgtaactgatacaccaagttggataaatttcagtttaatttgtaaaaaaatggcatttcatggatttagggataaaaatatttggagtaaattaagtggaattgtatatagtagacaaaattatagagatgaagatgaagaaaaatttaaaaaattaattaaaattcaatggggggttaataattatcaaatgttaaatgagagaccatatttaaaatatcgtggtgtttatataagtaaagtttcatatatgaaagagggagctagaagtgagaattctaattcatggaatttaccatataaaataattacatattatagatattatagattttacagtgatggaacatgtttaaagataattacaatttttgaaccaaagaaagttataccaaagttacgtaaaggttataaagtaaatgaagatattgaattaattaatgaagagagagaaagaatatcaatgaatacaattgagagtccagttgataattataataatagaaattggtttagaatttttaaaggtacatataatataacattacagggtgatgttgaaactaattgtgatggaccagttgaaaaatatcgatttattgataaatttaaaattgtcaatagtggtaaatatcatcgtcataataaacttgaatgggttgatcttggattttatgatacaattaatcattcatattcatcattgaatagagacaatgagaaagactttatatttagtcgtgttaagtcttacacttatcagtaacttatatcagatcagtatataagctaatgtatcaatacatcttgtacaacatattacgtaataatgatcaaaatatcaaattcggatatgagcgagaaatgtaaagaggccggagtcatatcacgtgtaatatgactccgaccttctataaatattgactctttcacagtaaaccaatgacgccgtataagaaaaccctgacttcacctatatatcggcccggcggatggtttatcagttactgagtgcccttttaaaagtaacactgtgaatacatgaaattaatagaagagtgggattgggtgggcaacttttattctactattataatttattaccacttagctttaaggtattttttcaggtatttgacggagtaagggttcggataactggggtgacatattgttatcttatttttaattttaaaagtataaatatagacctcatccccttttatttatagcagtaattgaattgaattaatttatatttatatttattctttaaactaaagtcaattgatcaattaacttaattaactcaattaacttaattaactcaattaactatgccagctcaattatttgttacaccattggatgatgttaaagtccttggtgaaatttctgataaaccattattatcaaaatgtactccaaaggatattttaactttagatgctttaaaatttgttgttatgttacatagagctttcaatgatacaagaaaacaattattagcaaatagacaaaatgttcaaaaagaattagattcaggtaaatcattacatttccttaaggaaactgaatatattagaaatgatccaaattggaaatgtagtccaaatcatccaaaattaatgtgtagaaaagttgaaattactggtccacctgatgcaaagatgattattaatgcatttaatactgatgttcatacttatatgactgattttgaagattcttgtgctccaacttggtcaaatatgatttatggtcaagttaatttatttgatgcaattagagataatattgattttactaatgaatcaactggtaaacgttataaaattaatagagaaggtagaagagtacctgttatgattgttagaccaagaggttggcatatggttgattctcatattacaattgcaggtgaaccaattagtgcttcaattttagattttggtttattcttttatcataatgcaaaatatttaatatctcaaggtttaggtccattcttttatttaccaaaaatggaacattggttagaagcaaaattatggaacgatattttctgtgttgcacaagatgcattagaaattccaagaggtacaattagagcaactgttttaattgaaactttaccaatttcttatcaattagatgaagttttatatgctttaagagaacattcatcaggtttaaattgtggtagatgggattatatgttttcaacaattaaaagattaagaaatcaaaaagatcatattttacctgatagacatcaagttacaatgtcagttccatttatgactaattatgttaaacaattaattaaaacatgtcataaaagaggtgttcatgcaatgggtggtatggcagcttttattccaattaaaaatgatgaagaagcaaataatgttgcattaggtgcagttgcaaaggataaattaagagaagttttagcaggtcatgatggtacttggattgcacatccaggtttattgaaaactgctttaacaatttttgaagaacatatgccaacaccaaatcaattatttaaacaaacatttgatgaaataaatgaatcaatgttagttgatacaaatattgaaggtggtgaaattacaatgaaaggtttaaatgcaaatatttatattggattaaattatatggaatcatggttaagaggtttaggttgtgttccaattaatcatttaatggaagatgctgcaactgctgaagtttcaagattacaattatggtcatggtgtaaacatcaagttaaaatggatgatactaaagaaattattacacctgaatttgtttgtaaattaattgatgaagaagttgcaaagagtaattcaagagaaggtaataaatatgaaattgctgcaactgcattaaaggatgaattaactggtaagaaaccacttgcagaatttttaactgatatcttatatccatatattgcaactcctggtgaggcaattgatttaaatactttaaagaaatgattattttaacgaaattttttatttatgattattattattattattatgatgatgatcatgtttttttccatttattatatagcaaagatttatacatattatagctaagtttatcgatttttacaaacctttcagagattttatatctttcagaagagaatccatacatttaatcatacttttttgatcaaaaatatttaattttaatgatttatcaataatgattgcattaccattattttttgcatgtaaaattgaatgaattttattgaaaaatactgaaatataatcacgtataaaagttatatttgattttaaacttgaaaaattaatatttaaagttataagtatatttttcaaaatattttgaatttcaaataatttcagattatcaattttattcaattctaatgtaatatatttttcaccaaaattatcaattgttatattattatcttcagaattaataccaattgtattaatttgtaaattattaaaagaatttgataattcatcaaatttattattaatattattattttcaagtcttaaattatccctttcaatttgtaaagtatttaatttttcatttaataatgattcctttgtatttgattcaataactaattttgaattttcagtttttaaagtttcaatttcatcagataatgttgaaatagtttcagttttcttattagattcaacttcataattttcaacaaattttttaagtttttcattctcttcatttgattgggagagtttatgggtatattcattaattaaatctttattcatttcttcaaattttttcaattgtgaagattgtgaattaagatttgttgatagatcaatattttccttccttacagatattaactctttttcaagtgcaataattttctcctttaaatttaatttatctattttaagtacttcactatcatgtttaaacctcgtaacatcatttgttaaattattgatttgaattaattttttatcaatttcaagttccttattagtaagttcagattccaatttatgtgtatcagtttcctctactttagtattattgatgacaggaatattgttattattaccaataattttttcctttgattgatgtctatttttgagtattctatgtcttccattactttccatgagagggatctttttaataattgaagcatctgaaacatcaccatcaccatctaaaatttttgattttttcaaatttttagaattcaaatcaatatttgggaaatcaaaatcatcatggtatttagtatgactggatactatccattattaaaggtatagttatatatttaaagaaaagctataaaaaaagagggttgttaattgatctactaaggaaaaaaaggtaaacatgaaagaaaaacacgttaagaaacgaggcggcgcagtttttcgttttcttcaagtaaaagtgaaatttcaacaactgccatgttcagtacaactgctttctttgttgaattagatgctttagatcgtgatgatagacgtcgtttctgttgtcttctggttaatggttcttcggatatttgctgctgatgttgttgttgtagttgttgggtttcctcttcaaggttgaagttagaattatttagtagttcttgtaagtcattgaaggcatgattttattgcatttctacgaagtctctcagtttcattatgtaaagctctcttagctgcagtatctatatgggattctttactctgtttactctcttgttcttgttccttctttggtttagtttgatgtcgtttttgtttttgtttttgtttagagaatttttgctttttcaaaggtggctcagtcggtattaatttttgttctaatgggaattgttgtggcggtggcggtgctgtgggcggcggtagttgatctgaagttattgggtaatcaattatagagtcaagaaatgattctaatgccattgattcacttgtagttaataaagggattatttatattgatattattattattgttatcatttaaataattaccatcatgatgaatatcatttaatggtattgaactaaatggtgaagtgaatgataaatttggtaataaacctggagaaagagcatcatttgtaaaattttggaaattatttgattgatttaaacctggtgataaaagtaaatgtcctatagcatcgaaatcaaagtccattgtgatgatataagatactaagcttaatgttttagaatagaagatatacagtataggttatttaagtaataagaaggtgataataatttattttaattaatttttattagagcacatgcgcatgtgaaaatttgcattaaattattatatacactgatctttaaattttaaaataagacatgacattataaataaacattaagttacctttatttttggaaaaaaatacttataataatattacattaacattaaactatacataaagaatataattatttaaattctatttgcaagtacaaattttgataaacgattttctaaaatttttgaatcactttcattaataacacctgcactttgaagtaattcagaagctgcaattatatctttatcccaattaatacttgtaacattatgactaaatttaacttgacttaaccaagcttcaacgtcttctctactattataatctaattcttttaaaatataatcaattgatctattttcatctttttcaaattctttaataccttctaaagttgctaattgaaatgatttaacaatttcattattaatttgatttgaagtacaaataacgaatggtgaccaaggagtataaactgaacctaattctttaatttcaccacttgtccaatattttttacttgtataatattcccacataaatgcatcactttcaccattattaacactgtctcttaaatttgagaaattatgtttaacaatatattcaaatgaatgagggaaattttcttgtaatcccattataaatgacataacatatgaaccactaccaattcttgaaacaccaattttattattaccaaatttttttaaatcttcaatattatttaaatcatttctattaataccagttgaaactgcccaacgtaaaggagaaataacatattcaccaactatattataattttcatcaccattacaaataccacgtacaaaggcttcagttaaaccaactacaatatcaatttcattttttttcaatgaagttatcatatgacctgaacctgaaggataaggtattaattcaatattttttaaaccaaaattattataatgaccaaatttatcagcgaataaaattggagcactataatgttcaggtatataaccaacacgtagttttttcaatcctagtgtagtaagtgtactcattttacgtaacattctataataattatattaatagttgtatggttatggaatggtataagtgaatgtgtgagtgaataatagattattaagagataaaaaagacaaagaaaaaggaaaggaaaacaagccacaaattcaaattcaaaatcaaaatcaaaatgggcctacataacgttgaaaatataagcaatgatcattattattatgatagtggagaggaagtttatttaatgccgagggaaaattaatgggaaaattaatgggaagtggtgggatggattaatcggagttaaaaatggtattacgtaatatacatatagagatgagccacctcttttttttatttttatttttgattatgtaataatgataataataataatgataataatgataatattagatatcgtttataaagataaacctttaaatacacagatcctatcttcttttataaatacatggctttaataaccatttaccctctgccttatctcctctaacagcttctatactagcatgactcttacttgttattggcttataaaattcaaatcttgtaaacatcttattcttatcatccattacctttaatttaaatccaagactttcaattgccttggtaaattcactactttttgaatcacttaatctactcttaatttctgtaatccataaatctccctcctttaactaatattctattagcttcttcaatgaaatcaaggaaatttgtacccattaaacttaaacaaaatataacaacactacatgattcatcatttcaatggtacattcttaatatctgcaactgtaataaattcattaatcttctttaaatcaaaactatgaacttcacatttaaatttcttaactttactcataatatctttaccatttccatatttctttttaaataattttaatgtatcctttgatgatttactattattaaattttttagaaaatttattaatttctttagctaaatttgcttcaccacatcccatatctgcaacaacaattcttttatcatctttatcccaatctccttctccactacgaaatcctcctggtgcattaatatttttagtaatacccctataaacaatttctctaatcattatatcaacaggattttcaggccaattctcaacttgtgatgcaaatcctgtatgatattcttcatataattctggttgtttactaatcatttctaatgctttatctgatgttgttgtatataattgttcattaatccatctaaatcttgaaccatttaatttatttaacattttacgttgtaatggtgttaatgaacttgatgcaataagtggtggtggggcttcactttgtataacttctttatctttaaaatcttcttcagaagtttctttggtttctttgtcttccttattattatccttcttacccaatttcttatctttcttacccttctttatattttcatcattttcaatcttttcttgaagtttcttctcctttctttcctcaatttctttatcacgtttaatattcttagctttcttagttttttgaactttcactttacgatcttcaagaccccatccatcaacatcaaataacattgtatgtcactataccttaatttagtttatgaatctgatctgataaaaaaaaatttttattcatcaagtgaaatttataaatttttttttcaacatgaaaattcataatcgctaataattatcaaaactcaaattactttctttaaacataaaaaattatgaaattctactgtaatatataaatttacattttatttattaattaatcctcccaactcccaactaaatctattcaaaacctttcttgttttcaatttcaccaaatcttttaccatcaaccggtaaaattggtgatataatattattaaaagaatcaaatccactaaatctactaccatttaaattacctacactactaccacctgcacttgcattaacactagtacctgcactattactatttgaaaatccagttgagttcaaattatcattcataacactaaatggtgaaatatttaaattactcataaatccatcatctgtattaaatttattatttatttgatttaatccacttacaccatttaatccattaagtgcattaagtccatttaatccacctagcccacctaaaccatttaaaccatttaatccacctaaaccattcaaaccatttaatccatttaaattcattgaattaattgtattattaatgaatccattattatttatttcattattattaaatccattattaatattttggttacctgtattatttaatgataatccaccaattctattaactaaatcaaaatcaagtgatgaataaacattaggtgtagaaattgttgataaattagtttccaatattattattagtattggttgtatttgtgttaaactgtggtaatgaattagatcttgtattgaaattgttttcaagaatatgtaaattatgtggattgtttaaaacattattattacctttattatatccattagcgttgttgttattattgttataattcataccattattattgttataattcatttgattgttcgttaaatgatgtgttgtattgctgtaattattattaccattattattattgttattattgaaattgttataattattattattgttattattactattattattattactatcatcatttttattatgaatataattatgctgttgattatgtggatgaccattcataattgcattttgacttcttggtgcaccacatttgagacaacaaagatttttagcaaaattatgatatgcacaattatcattgatacatttccaatcacctgcacgaaatggtacattagatgattgtctactactatacccactattattaccattatttccattatttccattactgttcccattattattattgttataataatgattattattattattattattataattattcttattgtaaccattattattataatttgtataaccgttattgtacccattattgtacccattattgtacccattgatattaaaattatttatatcagtattattattattatattgcttatagtcattagatttcatcatataattattactattgttgttattgttgttggtaatattaagattgacattactattattattggtattattattgtaactattggtattattacctgaactattattacgtgatttatagttcattgaattaattgtacttgatgaaccattattataagttgaattacctgaaattgattcttgaacagcaacagctgaagcagcaggaaatgaacatctaaaacaagcagttcttctttgaaaattggagaatccacatgatgggcaagaccagtcaccaggtcttggtttattttttgatgatgggaatggacctaaaatttcttgtgctttctctaaaacttttgttgatgaaggttcaatttcaatcatattttcattaagaatttcaccattcattgttaatgattcaactgcatcttcatgtgattggaaaattgcaaatcctgaacatttctttggtgttgtattattattgaattcattttgtgaaatcattaaatgattatataatattggatttttcaatattgaaaatgtaattgattttagcattaattttttgaaaccaaaatttctaaatctgattgagttgtatctgatggtaaattagttaaatatacaactcttgatttttcaatgaaaaaataacttaaatccatattcatatcatgaggtttggtgaaaacttgttttgatttatcattctctctaacactcttaataataaccaatatatcagataagttatcatcattaatttttaaatcatcatcagtttctttattgtttttgacaataattcaatttttccttcattgatgatagatctaataaattatatttgatagaattaaattttgaaaaaccattcaattcctcatatttgataaattcctttttcaaatcaaaatatgttggatattcaagataattaggcaattgtgctttgatattctttgaatgttttataaattttacacgaaaatcccaacatttaacggaaacaaaataaaatggaatttcctttaagatacaatttgaatgaattgaatcagttaaaatttgaataaattgttgaaatttagagtctaatttattatctttattagtcaatcaaatcgattgctttgtttatcataaacttcataagttgttgaattgataatcataaatgaagcttttgtgaattctatgatattcatattattttcatcctttaatgaaaaatctaaaagaacataattagaagatgttggtactgaaacattattaaagtctgtgacagtattagtatgagaattattcatatttgttagtagattcactgaaccgttatttaatgggaatgtcgaaagttcaccaggaactgttggaataatacttgacattatatatactattaattttttattatattttttttattatttgttacctgaaatttaccacccagttttgtttattaaaatcctttatttttttctttatatactaatacaatcaaaccaaaattatactttaatattgatagtttactttcccttgaaaataacctttattgaacgaaaaaaaaaaaatcgaaaaaccctgtgtatgtatataattttatacctatacccgacacacactgaaatatactatacttagatagaaaaaaaacaaatgcaataaaatagaatgaatcaaagagatagacccagttctattatataatagatataattgcaagaaatactaatacaaatacagatacaaaaaatccagataaagataaagacatacagatcaaaataccattgataaccttagttactcactttccagtgaatttcgccaaaaaataatttttttcaacgacttttcatttgacgtggaaaataaaatgtaaatttaaaatagagggcatgacaggggatttgttgtggtgggaaaaggcgtacatgattattgtttcatcgataagttgaaattgatgtggattgtttggttttttcataatttattttatttgtttcttttctgcaagtgtagtctgtattagttatcagttatagttagtttgtttgttattggaaagatatgttagataataactcacaacaatcgatactgacattgattcgtaatgtgacatcacgctcaaatgaggtaataataaactatttgcagaattctgatgataataatgatcaacctccattatttgatcctagaagacagacacaaactcttttcaaagttcaattatacgtttgttcaatccttggattgttttgctttctgttgttttgctatgtcagatctaaattccctttattttatagtataaggagttataaaaataataagattagaaaattacctaaaaatatgtttagttgggttagaatattaatatcaatcaataatgaccaattgttacaagttgtcggtttagaatcctatgttttcctatgctttttcagaatgtcaattagaatcttattttcattaagtatcttaggtctatgtatattaagtccaatacgatattttatgacaggctcatttgatagggataattcaacaataaattcaatatccaaatttttattttcaatatcaacaagtgatggtaataatgatgatccaaatgatgaaaattcagaacctgcattataccttgcaatatcagtattcttcacctatgttttctctgctattgtattttattttttatttaaagaaactaatcatattattaagacacgtcaaaaattcctaggttctcaaagatctttaactgatagaactatcgtaatcaaaaatataccaaaaaatatgagaaatgaagaagaattaaagtttcacattcaagatttaaacttaggtaaagttgatcaaataaactttgtttatgattacactccgttggttaaaatgttaaataaaagagtagaattagtaaatcaattagaaatgctgtattctaaaagttgtggcttagatacttgttttaatcatactgatgaacaaagagtaaatttgaaatacattgaaacagacaccccacccacaaaggagttaattttatataatcaaagggaattaaagacacattcatctgctgaatctaccccatcaaataataaattttatgttttagctacattaaatgataaaactttcaataaacagaaaagatcatgtatgaaaacaaataaatctaaaaaggaacaaattgacaagctaacacgtaaattgatcaaacttacagatgaaataaatcatataaaacaaacatacatttttaaaagactgccagtagcttttattagtatggattcagtaacggatgctcaaatggctgcacaagcagttttctctccaaaggtttttgaattggtcacagaattagcacctgcacctcatgatgttatttgggataatcttattattgataataaaacgttatttcttcgaaaaaatattattgaattaatcattatcttattcagttgcttattgattattccaacaagatacattacatcattattgaatgttaatgctattactaaaatgtggaaagaattaggtgattatttaatgaaacatgataaggctagaacaatagtgacaggtttgttacctacttatttattttctatcattaatgctgttttaccctacgttatttcatcattatccaatttccaaggtttaggatcaatgggtgatgttgaactttcagttataaagaaaaatttcctgtacatttttttcaatcttttccttgttttcacattatttggtacactttcaagttataaagcactattgactgatacaacaaaaattgctccacttttagcaacttcaataaaatcattatctttgttttatatcgatttgattattttacaaggttttacgatgttccccttcaagttattgcaaataggtgatctttcacttttgttttggaggttaattgtcaactattctaaaagaactccaagggtttttagagaaactctttatagaccaccattatttgacttaggtcttatactaccgcaacacatgttgattttcatcattacaatcttatattcttcgatatctaccaaaattttaatttcgggtttagtttatttcatattgggattttatacatacaaatatcaacttgtttattcattagttcatccttatcatagtactggtaaatcatggccaattatttttaaaagagtttgtctaggtgtctttattttacatttacaaatgtttggatctttggcattagaacagtcattcgtattagctggttttatgttacctctttttccaacaactttggttgctttaatgttttttgatagacattatcagccacttttacattatattgcgcttgatgcgatcaaaacttgtggtagaagtgttgaatctgaatcaactgataacgcacttgatgaattatttacaagtatgtctccatctaaaaatgttgcaaggaaaaatagtattaaaagcattgacagattgttggatggttatgaaaactctgatgctgttatactgagtaatccaaatgaacattctaatattttccttgatgaaaatgtcatagacgaaagtagaatctcaaatggagttcactcagatgctccagattcaattgatggatcacatttaccagcttataatatgtctgctacttctagaattactattaataattcaaacatgcgccgaagatgtagtactattgaagaggaaagagaagctacacaaagttatgttcatccatgtttacttgataactacgaaggtttattgataggttgggaaaatgataaacttgattacttaagactgaaaattgtaagtagtagaggaaatgaacaaggagttgacgatataaatacttcaaatcatggtgcaactatagaagagaataatgttgatatttacaatgatttagaaaatgaaattgaggggaatatggatcgtgtttctgaagatcttgaaaatgccaaaggtgatatatcaggatatgttaccagagttatagcaaatgaagaaatttggtaataataattaatttttgagaaaacaaattttataatcagtttataaaggtaatatttagcttttaatttcaaacgaatgtgtagttgttatgagagacacgggtaaaatagaaattacaacatgacaactccaacagaacttactttattattatctaagaattcattagtcttgctgtcaataccaccagaaatatgtgcagctttgtaattaaacaaataatagtgtaaaaatccatcaccagcaccgaatttaagatcatctaaaaagagtgtgttatcttgagatgataaagcattgaatacatcaatcttttgattctttgcttcaaccatagcatcattaactaaagactttaatcttttctttaataattcttgtgattcagcatcatttggagatttaccgataccagcttctgatgcataataatacagataagcaatacctaattctttatgttttggattttctaaaacgctgaatggaagaacataatatgaaataaaatcagtaattttattattttcatcttcaacaatgtatgcatgaataactttaccgtcttgattatcaccaccatatatccagtgtttaatatcttcgatagtcattatttgagtaatttcatatcttgatttccatgcgtcatataatttataaacatcttcaacatctttttcgtccatttttctccagccagaagttttagtttgattacttatagtagttttagcaaccatacttgcctttgtttcacccattggtaaagaactaaatccacactcatataattttgtccaatttaatggtctgtggccgtatctacatgtacttaatggttttggtaaaactgttcctgaagtatataatgcttgccagatattatgtaaattgactcttcttgtaatttccttgattaataatggtgccaatcttttagatctaagttgtttatggacacataaaaagttgatttcaacacttttaatgtcattatttctgatagttaaatcacctggaacaccaccaataaatgcaactaatttacccgtttccttgacacggacacctaaatgccattctttcttccatccctggtggttttaatgcccaattaaaaaagtccttagaatatgcaaatctgaaaactgcatcatgatcttcaacatagtgatcataaagtaattcatgtaattgatctaaatcatgttcagattctaaatccagtagaacccattcaaatgatgaatgtattggatatggttcctttctaacatcatcaactgtttgaatagtaattggaccttccttttcaatctcttcatcaaatcttggaactggttgtgtcttccaaaatttatattcatccattgattttggaggttctgcaggagatggttctttctcatcaacgaccatttgcttaaacaaatcagctaaagatttctttgcttgttgttcctttgagttcccgtcactcatattatatggaatattaactgttgtgatatgatatttacagtttcgaaatcgaaagaatgctaatgttaatggtcgtggtaatgttatgtaattttcatggagcaaattattattttctgattttcgattttgtgatataatttgaaataaaaggcgtctgtacttcttattgatgaaatctatattgatattaagagcattgggatattgtaggtaatacaatagcatgcataattttgaactatcaggaaatagtaccaagttcacattagttttcgatttattttcaatatctgacttatttgattccaacacagaaacatcaaatctctacattgacactttaattgataaaaaaattataaattctttaactgtatataatcaaagtaattggattacaaaagtttggaataataaagatattttcgttacaaaaaatttaaaggagttcaaaaataaacaattatcgttatctaagtggtcatcattgatttcatcaaagatacaaaattcgagtaaatcagctctactgggaggtgacttgaataaaagtaaaaaacatatagattacagattttcagcaattgaagtaacagctattgacgaaccattactatcaatgtcgataaaccataatttgagtgataatgccatgaacagtgataaattagcagctgaattgcttggagttggtgttataagaatattcaaagattccgatgatcactatcaattcttacaaaataagcacaaaagatatgaaacatgtttctggtgatgatagtacacttgcaattctagcagtcccgttttattttacggccagtgatatcttattaggatttttcaatgaagaagatgttaagaaattatcacatttaaggttaatcaaatctgttgaacctaataaatttatgcttttgttaaaattaagatctcccaatgatgttaagtcatttataaggaaataccaaggaagaaagtttaattcgtttgagcctgagacttgctcaattgtggaaattaaagaaattatattcagaccaaaagaaaccagtgaagttgatgatctaattaatgttgcattaccttacttacttgatgatccatttacaacagaaaaggcagaaaagaagggaaagtcaaaagaagttggtctgaatcgaatatacacagaacttgctacatgtccagtttgtcttgatcgcttagatagtaatatcagtgggcttttcacaattgcttgtcaacatacatttcatgctgattgtttatcgaaatggaaagatgattcatgtcccgtttgcagacatactaataaaagtacgcatgctttatctggtgatagtgtgaataccttagaaagtgacgaaaagtgtaaagactgtgaagctacagaaaatttatggatttgcttagtttgtggtaatgttggatgtggtagatatgaaaataagcacgctttaaaacattgggaggaaactaatcattgcttttctatggaaataaacactcagcgagtttgggattacgctgaagatggatatgtccacagactcgttcaaaatgaagttgatggaaaaatcattgaacttcctttacgagatgaaggtaaaaagacaacagaggaaaagattgataaaattggtcttgaatactcaaaactgcttatatcgcaattggaaagtcagaaagaatattatgttgcaaaacttaaagaaggtactaacaaagtaaatactttgtataaatcatttgaaaaaatgtctgacagagtaactgcaatggagataagtgcacgggaatttgattctttgagggatgaaatgagaaaacaacaaaaggcatgtgtaaagttgcaagatgctatgtgtgatatgaaagcgttaaattactgccctaatttataaagttaaggtaatggatgctgaaaagaaaaagttagaaaatgaaaaggcctgagttgcaagagcaagtaaaagatttaatgttctacttagagagtagggaaaaatttaaggatgcatctgatgaagtcaaagaaggacaaattttaatgacaccagctccagtacggaaggaaacgaaaaagaaatcatcaaagggaaaaaaatgaataagctattttagcaagtaatatacatggaatagattgggtatatataggtatgtaacatattataatgatcattggcttgtatcatcatatgaaactatttcttgtataggaaaagtcagtaaaataaacggaatcttgtaaaattccatcattgtcaggcttttggattttaattattgatgagctactatttgatctactttcttcaatgtgatcataaataaatttggaaattggtgaatttggaggtgtgatatccaaggatgtgaactcgtgatcaaagttttctgccatttctggattacttataactggaactattggagggggttcaagctcatcattttgatcttgtaaatttttccaattaatgtatctgaaaaattgatgttccttaatcttcttaaaaacttctggatcatctaaattaattcttttctccatatttttatttaagcatttattcaaaaaatctttagcaatttgtgacaaataaaatgggtaaacaactttttttgttaaaattttatccataattcttttgttattattacccgtaaatggtggttgaccggttaacatatcaaacatcacagcaccaagagaccaccaatcgcaacgagaatcatatgtttcacccttaataacttcaggtgcaatatattgagccgtaccatccattgaataacattcagttgaaactttacttagtccaaagtcggtcaacactaagtgaccgtgtctgtttaataaacaattttcgggttttaaatctctatagatgacacctgcattgatatgtaaatgtctcaatgctaatatcatttcagcaacataaaagcaagcaattttttcactcattattttttcttgacttaaatggaagaataattcaccaccttcaagatattccaagaataaataaaccttatcaaaatcttgaagtgcataaaacaatttaacaatatttggatgtgacactttttcaagaattgtacgttcagtaagtgtacgttcatagtttttagtattaacaatcattgtagcctttttcaattgcttttgagcatataatttcccagttttattatgtttgactaaaatgactttaccgaatgaacctttacctaaaactttgattggatgaaagtcagaaacaaccggttttgaagcccttaaaaagggctgattatcattcacgttaaaattggagttttgcctactttcaccatctgcttcaaaaacttcatcaaatttgacctcataagactcaccaacacgattatcgagatgacctactgaaataacactatttgacctatattttttgaaatatttaatatcttgattgttattcttattaacactatcattttcattttcattttcatcgcaaatatccagactatcatcatcataatcatcgtttgtgacactaatcttcaaattagtactaatatttgagcatactgcatcttcatcgaatgcgaacaattgtgtcatttctcaaaggaacaactactttaaataaatttcaaagataaaaaaatgtgatcaaccaaatgtgttaaacaagtgatccttacagtgaacctctactctataactcccaatgaaacagaacagttcataaattaaagcatgcacacatttcaacttatcaattggcttttatggattttataacgtaagcaactctgtacaccttaaaattttattttgacttcatgaatggattatatagagctattaatggttaatataccgttaaagtatactatttgaaggtgatagggcatcatagaacacactgcatattgatctaaatgtctgaaggatctgaaatttcttcaaaaccaaaaagactgtcgagtaaaagaaaaagactgggagttggacccaatattactccaaacactgttgcaaaatctcttcaaaatagtgaattcaaagatcctaaaaagtggcctccaaacttacacaatttcatcagtcgttcatttcgtgaagttagtaagaaaaagttaaatgctaatcaggtacaacaattaaaaatcaattgaaaaatataataaatttagctatttcatctgataaactttttgtaaatgattggaataagcaagaattaccaattcttagctggggaaggatataagagaatttcgttatattgtgatgaagaagagattttgaaaacctctttaatgaatacatcaatcgatgatgaaactaaaacaaaaattaaagaacaaactgaggcacaactttatagaaataataataagaagagtaaaaatatttttggtgaagatgaaagtgatgagagtatgagtgatgggtatgaacctactgtatttccccaatcgaaaccaaaacaaaagcaattgagcttaaatgatactttaacacgaataaaaaagcaaaagaagccagcaaagaaagaatcacaattattgaaatcaccttcaccatatattccaccatcagcaagaaacaaattatcaacctccaacgtactttcctctaaaaatggttcatttgaagatgagcagaggaaggcaatgagaagcaaaagatttgagagggaattgtctacaccagttggtaatcgatattatgacgatgatacgatttcaacgggcccaattgttggactaaacactaatttagagaagaaatatttaagattaacatcacagcctaaacctgaagctgttaggacccttacatattttacgttcaactctaaatttattgattagtcgatacttagagggtgcaacatataattatctctgtgatcaatgtaaatcattaaggcaagatttaacagttcaaaatataaaggatgatttcacaattatggcatatgaatttcattctaagatagctattgagaataatgattggggtgagtttaatcaatgtcaatcacaattatcaattttatatgaaactgagggattatcaaaacctaactgttatgaattcttatcatatagaatattgtattttcttttaacaagtaaatataacgaaatatatgaactgcaattgaatttaagtatgaatggggatgagcaatataaagagaaccaatttatgaaatatgcatttggtatatttgaccaaatagaagaggggaaattattttgaattatcacaaataataaataaactaatagaagataataaaactgcagagagagaactgatggagagtgcagatataaactctttagaaaatatacttaaattaaaacacaatccattttttttctttgttaattttgtcaaatcaataatggatagagaaaatattaagacattatcaattatctgtaagtcatatagacaaatttcactagaatatttggaaaatgtcttatgtatgacaagcaataatggtgaagaacattttgttggtgaattcgattcttttatacagcaacaccaattaggtgaatatttgaatgaaaataaaactttactggaatgccgtaaagcgagaatggtagttgatgcattaatgaggaaaacgtttagtaagattgatattaaaggacaaggtatgattttaatctacttaatttagcatataaaaaggggttaaggaaggaagaagtgaacagaagaataaagaaaggacaggtattatagaaaatttttatttagactagtatagattggttaaagtttttctaactcatttgaaaaatacattatttgtgtaataaatttacccttataccttgtaatacaagagcttgtaatataaccatttttatttaagttacatgttattaaatgattaagcataacatgatgaggaatcaagcttctttcaattaaattgattttatcttgatgtttcaatttattagatccttcagcactattcattcttaataatttattcctagcaacgatattattctttgatttatttaacatacttgaagaagcttgaagaatttgagcttgaagatcttttcaatataggtcttaaagtacttttattagcactgtatttatccataatatttaagtcatttattctatatcgataaatttcattaacatgaggtgtggttgattcttgatactgataaggataggttttataatttttagagcttgaatcatttagtaaatttgaatttaaataaaccggtaataatggtggtgaactaaaatgtaaatctttcaataaatcaaaatgatttatattcatgaattcttcatctgtataatctagaggtgatttattagggtaaactaatttagttgaatcatagtagaatggaatttcactaacatattcaattttcttttgcctcataaacggagattctccccttttaatattctctaccaatactatcataatgtaaatcattcaaatgatcagttgaagagataatgttatcggcattaacttgattatgattattagaattgtgatcatgggctccttcatatataatcattccttcatcatcgaatatttgcatcttcatcataatcaaaatcatctaatatttcgtttaatggtaattcattataggtatgttcatcattaaattgatctgagaaaaaagttactgaagcatttctactatgaaaaccactatcattaactttataaaaaggttgatatgtatctttatgaaacatttcatcacttatattattgaattcttccattgaagattgtttatgagtgtaagatgattcatttgacattattttaggtcttttagtaaaatcaggtaattcaggtaatgagtaatcgtctttaccgttaattttataatgacttgttatattatcgtaatctctcggttgttgactattatcaaatttattattaccaacataattatcaatatttttaaaattataccttcccttatcgggatcttcctcattgaggggctgtgaatgtgacatagcctcacctactttttgatgcacatagggtacagaatttccagacatgttgtaaaagttgtatacgtactgctacagagagatgataagaaaaaaaatgatgaaaaataagatatagatgaactacatacctatcctaaatattgactttcaaccatataataataatccttaaatcaatagataaagcaacgataaccatcagaaaccggagaacggaagcattaatcctcttcgtttcaataatattacgtcatcgtccattttaattcatgaggagaaaaaaaaaagaaggtggctcaactttttgacaggcttagctaatatttgcatgaatattttcactttcttccattgaatgtgcctaatagagtaactgctatgctttggatgcttttcctataggtatgaaacatttcaagtatgttgaaagtggatagcaatagttttgacccttagaattatttaactaaggagaatctgctatatatttcatttttcatgtattcttttacaaagctacaatttaaggaattcttttcttttaggtttgctatctctcctgaaggaagtaaaacaacaatgagagtacagccattaataaatatactttgcttatatagcattaagtgaatcttcatatttgaaattaccaattataaaaaaaagatatgataatagcaatattcaaagtcattttaatgaacctcattatattataaaaaatgaaaatccctttgttaaaagagaacatcctgatgcagattttgaacttcatgctaaattcaatcagcttgcttataatgttgagttggaaattggttcaaataaagataaagtcacctttgttaattgatactgcttcatctgacatgtttgtcaatgatgtgaataatttaccttgtaaacaatacgaggaagaagaagggcctagtggtgatgaaaatgacggatagtgatagtgatagtgatagtgcaatatatctaaagaaaagagatgtctctgagaaaagctcgtgtggtgcaattagctatccacaatttgactactcagcacaacaaattcctatcagattatgattattacatgaatttaactcaaaacatagcagatccatctctttgttcaacatttggatattttagttcagaaaacttctactacaatggaatgaattagaaactccttttaatatagcatatggtgatgatagttctgctattggaactatgataactgataatgtttattataacggtatagaaatctcaaattttacctttggtttaaacactgatggtaatagatctggtccagttttaggtatcggttacaaggataatcaaaattcttatcaaaatggttataaccaatattcaagttttccatatcatttaaaagatcttggattaattaataaagttgcatattcattttatgcaccatatgattcatctagttcaaatgcacaattaacttttggtgcatatgataaaaatggttatttaccagaatctggattaacaaaagttccaattattaaatattcttcaagaaataaaagaggtttaggtccatattatttatctattacattaaattcaatttcaattacaacacagtccaatgattataaaagtgaattaatagcaactggtaatgcagctgcaattcttgatacaggtacaactgcaactgttttaccttattatatccttaatgaattattagttaaatatgattttaaatggtcatcacaagttagttcatatatcatttcagaaaaagaaattccaaaagataaagcatttataacttttaatttccaaaatgcattaattaaagtaccaattattgattttacatatccaattttagatggtgaaactttatcaaatactgggctacgttcaatttcaattacttcatttgataatgattattttttactcggtgatgatttcttaagtaatatttattttattgcagatttagaatcgaaatgaaattatcaattggacaagttaaccctcaaaaatcatcagagtctttagttatcattgaaaagtgaaattaatgacgcagttcaagtcctcaaattgggatcaagtttatggttataatggtatcactaatttgaaattaaaagatacttatactgttgaatgatttaaaaacagttgataatgtaactgaaaatattcaattatatgttgcaggtgcaggtgttgatttagggtggtagcttcactttttatactcttttatgtaaaattctttatgcacttatataactgttcaattattaaaaaaataaattacattattataatagttaagagaattaatgtttgacaggttttaaagatatatatatttttatacaatgttaagtaagaagtgaaataaacgtaatgaaataaaataatgatatggaacataatggtaatataaatgttcaaaatggtataaaaatggttttttcttgcaagtgtattgaattaatgcattatctatacatgtgataataattaatgagcagaagataaagttttagaatatggtgtaacggaaggagcatatgataatgaaaatgaagttttagtaatatcatttggaattattaacagttgctaattttaattcagtaacatcattataagccataagtgtaattatatgaagcaacagaagtagcattagggaatgaagagacaactgcgacgatatcttcagaagctggttcaaaatttttaggagcaattgcaacttcgttatcttctaaatcaattgaaatgtataaatattgtaagattgaatcacctaatgtaaaagtatctggagttgcatctaaacctaaaacaactaaatctgaaacttcctcattatcaagattaaccagtgggaaagttaaatctaataatggaactgaaacattaacaccttggaagttgaaaacaattgaatgattaacaagtttagtttcattaccaacaaatgcttctaatgattcagaataaacaaaaccagcctttgagacaatttcatcataaatataataaggtaatgaaccaactgaagatgctgtatcaataattgcagctgataaacctgatgcaattaaactagaagtttcttcatcagtcttcattagtttcttcaaaataaattgatgataaagtaattgcaattgcagaagcatttctagtatcattataagcaattggaatttcaactaatggaagaactgataaattaccaataaattgttctaaatcaacaccaccaaataagactgatgaatccatttgataaataattatcagtaaattgaataaacagttttattaatgaaaccttgagattttaattgatataagaaattatcataagttgaaccatttgataaccaagttgattcagcatttttcaaaccaagacctaaaacaccgaatgaatcatcatctgattcagttactaaaccgaaagttaagtttgaaattaatgaatcaccataagcaacaaagtcttttgcccaagtaccatttacttgatattccatcataatctaaagattcaaaaggttcatctaaatcaataaaagattcaggaatctgatgagttgaataacccccaattagaacagctttgactttcataatttaaaatttctaaattttcaattgggaaagttggatgtggataacttgataaccaattagttgaagctgaagctgattgtgaaggataaaattggatatcataagaatttgtagatctgacagtagttgtttcaacagatgttgttattgtttcagttgatacatgttcatccgacataataaacatcatcagcactattgtaataacttgagtaataagttgaaatccttggaccttgagaagatgaaggatgcagaggatgaagatgatgaggtgatcgaggtcaattgaggtttagtataggtatatttaactgtgaagttattggatggaggaaacatcaatttcatcaacatcatcactatcatcatcattttcaatttcctttgtaccattagcacaaacggagttatcgattgaattaatccataaatcagaggaaacagtatccactaaaactgaaatattttgagcatttgaaccaattgctaaatcaactgcataataaattttatcattaaatatacctgcaactgtaccatttatatcagaagattcattaagattatttttataataagcatatattggatatttttcaatttcagcattttgagcccaagaaccttttaattttttagcagtcaaatttaagataattgacgtcattagctgatactaacgcaaagaaacaagcgatagttgagagaatcattgaacttgaagtcatttgtcaagagaatgaaatgaaatgaataaataaagaatcaattgaaattaaaaaaaggaaaccatggggttttttaaagagaattgagcctaaggcagaaaagttaaagggagagcaaccattattgaaataataataaaagacaacgtcattaatataaattagagctaaatttagcaattttcaacgcactaagttttcctatttaggaaagtgtcaattatttcacacttgtgataggtttactctgattttgctctgtttgatctatggttaggtattcacgttagaatgtatatctgtgctcttataaaggatattagtatccacaatggatagtattgaaatgcttaaaatggaatactttcaatttttattcttattaaccattaacaatcacaaaaataatataagcaatgtccttatcatacactaatatcacacttttttttgttttcttacattcaatactcgttaatgctcaattatctgattatatctctcataaaagttatcaacaatcaattacagatagatataagtacatctcttgcaccttggaaatctttagatattgtacaaagtaataacaatctaaatttaaagtggaaatcataaaattcttcattctttacatgcacatcgtctaataaatgtaaaaaaattacaaatttcttagattttagtgatgactaatgatattgctgttgctttcgatgatgaaaatttcccaaattcttatcaatcagatttgaaaaaagttaagatattcatctccagaattaatttcaagcttctgataataattataatgcatcatttttagtgataataaaatactgataatttaacaattccaattaataatttattagaactgaataacgatgttgaaagttccgtgttagtcctcacatacttgtctatgaacaaatcgatgttcaattcatgtaatctgtatactatttattattattataacgaatcctacctttctgaaaatactatatactgataacagtgaaagttcccacccgccgcatttttttattttcattttattttgtggcgcatgtattttaatgtttacttcacgtaaaatctattgatgttgattttaacatggaaacatgatgcttgtacttccttcctgagcaatcaaataatgtcattcttagatgaaatgcatcaacatttagtatctatagatacaatgaaatttaaaacttcaagtattttcacaaattcattactcaaaactcatgatacaacacaaattatacgtgatattagagatgaagaaattgttttctttaaaggtaaaaaaatgcaatttattgattatgaattaatgaatagcttaggagttgcaaattcaaatgattatgtccaatatgaaattactaatttattagattcaattgataaacctgaaattgatgatggatcttcaacaccaaataataatttacaaaaaattgattttaataatttttaatagataattcattgagtgaaattactaatgatgaacaattttatttagaatttaaggatgatatattagaactattcaaattttataaacattcatatactgttaaaaatatctgggcttcgaataataataataacatgttagactctgatacaaatgaattgttaaataatttaaataaaaaaatagatatgaattataaatagtcttaaagaaatatgggaaattcatcaaaatgttaaattatttcaagaaaaaatagataattcatatgaaaaagacgtttaaatataaaattaaactgaatttattctaattaatgttgataaaatatcatttaattttttcaatctatgaacaaaatctttaatatcattatcttcaattgcttctgctaaacctggtaattcttgtcccttataaccagtatatctaccacttgcataaacaatatgtttaaaccatgatctatcattcaatccttcatcatctaataaatgtctttcataaaaatgcaaaacagtattcataccttttgccttgaaatgtaatttaattctttggaaatatgataatgagtcccaatgcttatagagatcaactaattcctctaattttgcatcaaattccaaagattttaattgaagtgctgttaatttatctttaatttcattgattaaaatagtggaaatctcagtataagatttattacaataatgtttatggtgattttcatcgattgatttattataccaattatcaggaatttctaaattttcaaaataatcattaataccaattgaataatcatgagttcttaaattgagtattggatcagttgataaatgtaatattaataatgacatatatttagccattaaattatgataaataaattttggatcaccgaatttttccatccaataaaatgaatcatataaggaatgatattgataaacagatgaatttttcaaatcattgttaaaacccatatcaactgatggtatacctaaatgttctaaaaatactgtataatcagagcctgaacctaaggtaccaattgaacctgatttttcaataaaatgttcatacaatgatttttcggaatttggataatttaattcctttaaagttgataataaaatatcatttaataaaggtgatgcctttaaatctaaaatattaccaattgttgagacatcagtattaatataagcaacacattctttctttaatttttttgaatgatattcagcaaattcagttgaaccaatgagaccatattcttcaccatcccaacttgcgaaaataattgaaattcttggtttccaacctgattttgttaaactaccaaaagctctaataatttctaacattgttgaagaacctgaatgaggatcagcagctgctggagtccaagaatcatgatgattaccaataagtaaaaattttgaatcatcataaccttcaattttacccattatattatacattgttgaaatattgaaatcttgtttattaaataaattaatttcataatcaggatttggacctgttgaataatcaaaattttcaactaaaccattccaattatcaaatttatgaccataacctgaaattttttctaaaattggttgaatttctttaaatgaaacgggtaaagctggaatttttggaattgatttataaggacttgatcttgaatttgattcaccaggtttaattgcataaccaggagttgtaggatcaccaggattaattgaaaggaataaagctgaacctctttgaattgctgaaggatttctagcaaaacctttaggataaggtttaaaaccattttgaacaattacattaccatcatccattgtatcagtataaattaaaacaccaatcatttcattttcttgagcaaatttaatttttaaaccacgataaattttaccatatctaataattgcaattttaccctttaaatcaatacctaaattatttaatttttggaaatcttccattgtaccataattacaataaatatattgagaagttacattaccatttgctgaaaaacctaaaaatgcaggtacataaattttagaattttcatcttcatcaatttcatcttcaataagtgaagcattgaaaataatttcacttgtatttttattaattaattttaaaccattatccgatggataagacatataagaagtatattcatcaatgaaaacatcttttaaacctaattgaataaatttttcagctgtataattaaccatttttaaatttgtaccggctaattgattatcccttgaataatctttaagccaatcaccagctaagttagtttctaaagaatttaatataagagattttgataaatcataatcatttgttgaataattgaagttgttagtaataattttgataagattagtataaaagaatgggattgaaattaaaatccaagaaatgtataaatatttaacaattttcagtctaaaattacgtgaagaagttaattgggattgtgattgagattgagattccaaatcattaacaataatacaatcatcataagaggaatctttttcatcaacaggagtattatcagtatacctgttagtcatgattgataatataaaagataaaataaagaaaaacaaagaagaaatgaaagcttattagtaattcacagtaataaattatactatctctctctctctctctctctctctctcttatcattaaccatccctatcatctgattaatgtcattcctctcggtgttatcctaataattttaattttcattagtattaatgttgagccccctatcagtctaatcgacgcatcgacttttaattaatttatttaaagtgattacataatcatttaaatagtattataatttacttacctaataaatacgtcactcattaggttatcttattacctaatagggcaagtagattacatcataatagtgacttattatttaatttgatggcttgttattattgttattattgttattactcatttctatttatgctgatacagagggagtctattttccgaagtttttcattttcgtttctttttcatcatttcatgttcatttcttttgcactgggttgggtttttccatttagttttatttaaatacaagaccctttcttcttttttataattttccgttagtgttttgttttaactgttttattattaattcccttattattaacttcttttcgtaagtaagaataaacttagaaaaaaatgtcaactactagcgttcaaccattatctacacctgttgaagaaatcccattaaatattgaaagtcctcaagatattggatttgttttcgatattgatggtgttttacttaagggtaaaaagagaattgaagaagcaactgatattattaattatttatctgaaagaaaaattcctttcattttattaacaaatggtggtggtatgactgaaaagaaaagaattgatttcattaataaaactttacaattaaataaatatccaattaatgaagatcaattaattcaagctcatactccaatgagaactttaattcctcatcataaaagagttttaatttgtggtggtccaaaggatgatgttagagaagttgctgaaaattatggttttgaagatgttattagaccaatcgatataattaaagcaaatccaacaatttggccttatcatatgttctctgatgaacaaattgaaaattggggtaaagatccttcaattactaaattagatgttgatatggttaattgtaaagaaaatttaccaattgattcgattttatgttttaatgattcaagagcaattggtgctgaattacaattaattttagatttattaaattctgaaaatggtgtcttaggtacaagaagaactgaaaaatcaagtaaaccaagtatacctattgttttctcaaacaatgatttcctttggtcaaatgaatataaacaaccaagatttgcaatgggtgcattaaaaattgcagttttaacaatttatgaaaaaattaatggtaaaaaattagagcaattaactttaggtaaacctgaaaaagtttgttatgattatgctcatcatattttaattgattggagaaatgttttattaggtaaaaaatctcctggtaatttatgtttaccaaaactgaatgatgctccagttaaatcaccattcaaaaaagtttatatggttggtgataatccagaaagtgatataactggtggtaataattataattggggtacaatcttagttaaaactggtgtttatcaagaaggtgatttcgaattaaatccagaaatttcacgtccaagtttaggggtttttgcaaatgttaaagaaggtgttatggctgcattaaaattaaatggtctggcttaattttatactttaatattactattgttactattattatcacttttcatattaaacttttctatattatctaaataaataaatttaaaaatcgttaattattctttcattgtataaatataaaattacatatctaattcatttcctaaccttttcaattgattgcataactgcatcgtaaacatcattaaatacacctaatgttggctttgataaatttctatcaatttcaaaatctccatccttataaacaccagttttaactaatgcagtttcccaaccaaaattattaccacctgcaatatcactctttggattatcaccaaccattacaacattatcaaaatattcatttgaataagattgtaaaaatgttaactcactaccaattgattttaaattatttaatttcctccaataatcaattaatactttatcagcaaatgcataactctcaatttgtggtttaccataaacagtatcatttaattcattaccattattaagctccttatataattctctaattgcaattctaaatgcaccttgaccaaatcttggaattttataatttgcactccataataaatcattatttgagaaaattattggtatacttggtttattacttatataatctctttttgtaccaattaaaccatttttagaacaaagtaaatctaaaataatttgtaaatctgtacccatatctcttggatcattgaaaaccattattgcatcaattggttcattaatattaaatgaaattgaatatttatcaatttcttctttagaatatttaacgaatggccaaatatttggattttccttaactaaatcaattggacgtaaaacttttttaaacccataattaattgctgcatctcttgtaaatggatcaattccaccaattactaatacattattaaatttatttgttaaatatttcattggtgtatgagattgaactaattgatcaatttcaatattagtatttgataataaactatttaatgaatctaaacgtatcttttcagtatatcctccaccattagttaataaaataaatggaattttattagttttaagatattttaatgtttcaattgcttttggaattggagttttagaatgtaataaaactccatcaatatcaaatgcaaaagcaatcggagttttcggaattggagatttatgatttataaagttacaagttgtataaaatcttgaaaatgctcttgttagtttcattatgagttgttatttaaggaatattgtgtaaaagaaaaagaagatcagatcctaggaatttaaagttgatctgtcaatttgaatttcagataagcaaccatgagatgattacgtaagtttttatattaattctttttaattatgcttagtaaaaaaatacaattattactataataatataatactaggaaagatatctaagagaagagagagagaggaaaaagaatgtatattaaataagcttattataattttaattatcaataaaataaactaaagaccaagcagaacctgcagctattgaaccaattaaaatcatttgtaaaccttctaaacatctagttgtttttgaacaatcttcacccattgatattaaacttttaaaataaccaaaccaaaataatgtaaataacattaataaaactgatgataatagagcttgattaacagtttttaaaaagaaataaggtattaaaggtataaatccaccaaagaaataacctgagccaattgttaaagctgaagatacaattctaccctctggaggttcctctaaacctctaccaaatttaattataaaatcaatcatttgttgaggatcttttgataaatcattaataaaattttcagcagttaaatcagatgcacccatatcaattaaaatttcatataaatcatctgttatattatcttgattttgaaagaaaatttgtttctctttacgaacttgactaaagtaatattcattctctgattttgcagctaaataaccacctaaacccattgaaattgcaccagaaactaattctgccataccaccagttataactaaacttgtatcaccaagtgatgataaaccagcagttaatgcaaatggaactgttaaaccatcagataaaccaataattaaatcactcattatacgaggatcaacagatttcaatatattaagtgggaatggagaatttaaattaattgaatcattatttgaagattttgaagatatttcatcaattgaagttgaatttgaaatattttgatcttgtaattgattttgtgattgattttgattttgtaattgtgatgattgtatattattctctatatcaggaggtaataaagccgttgattctgaaggtgaatcattgttcgtgatattattattattattattattattattgtcagtggtatttgaagtatttaaataagaagcattgagtactttttgaacaaccagtttgacaccaaccagagacattgttttgagatagcaaatagagtagagtttgtaaagtaaggttaagataaatgaagttaaaaaataaatcaaaataaatcaaaataaattaaaattaaaattaaaataaaataaaaatacttaaaatatagtataatctttaataacaataagccctgcccatttccaaccagtgaaagggcgagaaaatgtaataattccactttcaataaataataataataaaataataataatacggggtcgatgcgtcggtcagtctcttttaaatttctttttaatttcttcaattttcttaatttcttatcttgacagattagatcattacaattacaattacaggataggatattattagtatctccagataagtcacaggatggcaaattttgtatttaataccatggcttttcccgtttttcttttaattctttctctttctaatttacttactttccttttcttctctataccactctctaatgaaagtacctattaaacactcagatattacatttttagcaactgttcctgataatgcttcagttaatgatttaattatttcaacgtttttatctttaccaatggctgagcctcctgtggcaaatttattaattaactctccaaatgatattaacctttggtatggtggtaggaaaatggattataatttacctttatcttattatggaatatctccttcctctttaaataatgagaattttacaattcatttaacttcaattaataatattaattcaaatataccaatatcatcatcatcaacatcatcatcaacaacaacaacaacatcatcatcatcaacatcaacaacagttgttataccaactaataaatcgaaatcaactaaatcaactaaatcaaaatcaaaatcaaaatccaagaaatgtttctttgatcattgtacttcaaatcaacttagaatggttggtgattgtcaattttgtcaagggaaattttgttcaaaacatagattattagaaaatcataattgttcaggtctaaaaatttgtaaagataaatcttatgaacgtaatgcgcttaaattacaatctgaacaagttgttacttcaaaagtttaatcattactataattattattacatacctttttttttcacctctttttttaattcatattatatccttggggggacttttcattacaattacaatgatataatggatcatatttacattctttcaggcaaggtttctttttcttctaatttatacttatattcacaataatattcatataacccttttattattattattattactattattatcattacttatatactcttttataactctctaattctcatcttaatcttagtaacgttttctcatctcttatcatgtatctattatctactttctttttttcgaattttctttatttttttaaaaactataatattataaaactttttaataatttacactaggtaaaataattaataaactagaactgaaaactaaaaaacttaatttaatggtttctttgcaacatataacatcattggagtgaaaagtttttgtttaccaccttcaactaaataaattgctgcttcctctaatgcttcagtaactttaacagaatcttttggtgcaaatccaactttttctaatgcaccaactgttaatgttgtaatttttctaccagttgcacttgttctaaaatatgtccataaatcaccaattgtttgaacatatttccaatcaccagctaatggtgcataccaaggaatttcatcattattatcagctaaatctttttcataaacaatttcaaagccaacatttcttaatgctttatctgcaacttcctttttatacatttttggaataccatcaccaacttcaataccataagcaattcttctatgttcttcattattttcatcatattcatctgtcataacccattcataaacaccaaatgtaccacctggttttaaaactttataaatttcactataaacaccttctaaaacaggtgcatgaacagttgcttcaattgcataaactgcatcaaaagtttcagctgggaaatccatttgcataaaatctcccttaacaaaatttaatttatcacttaaaccattttgttttgccttataagttgctctctcaatttgataatcattattatttaaacctgtaactttacaacctgtaaatcttgaaatttcagttgctggaccaccaacaccacaaccaacatctaaaacatgcatattttcattaatattcatttttgatgctaaataatgttcatgtcttgcaattgcttgtctaaatggttcacctttaaagaatgtacaaaaatgaaatgatgaaccccaaccatattcataaaaatctgtaactaaattataataatgttttgttaatgatgaataatcttctaatcttgaaacttctgcatctttatcagttttaccatcccaatgtttaaaatatccttcaattgcaacacttgttgcttctttatcctttgctgtcaatgcacttaatccaccagtggaatttacttctttaccatgcattgctttagcaaattctttatctcttgtgaaatttttttcagcaagtttaatgtctccggttgaactcattgtttaattatttatgaggtgttgaatccttatggaatgaaaagaagttaaaatataagaaatagaataaattaagaaaaagaagtaatttaagaaattaagaaaacgttctctttatactgttttgttaaatttcagaaaacacgtccattttttatcagattaaaataataataatggatagcgagaaaaaagcggtacgatttatacgaattatatttttcacaattttatgggatttatacgatataaacgatataaacgagcgcaacgaaatgaacgactatagaaattatcgtatcgtatagtatacgagattaaacccccagtttgtgctatatcaactccgattaatccacctctgataaagtacttagtctatgcatgggttatcttctaatatttaagataaggtttaggtttttagacagagatagagaggagttaaagcatcattttttgaaagatcgtaataatatgactaccttttgtaaaaaataattgatgcactgtttcataaccttatatagcaatgtttccctaatttaatttataataagttcaattcaacacagacactcaatactttaatgttaaataaaaaaaatataaaaaattaacgtcagctacaggattcgaacctgtgcgggcagagcccaaaagatttcaagtctttctccttaaccactcggacaaactgacacttatgacgttgtaagggaataaatacaagttgttcaataatatccacgtgaggattaggtaagccgattacgtaaagatgataagatggaaatatgaattccgagatacggaggttcgcagatgtcggagtaagaaaggaatgacttagattgaaattgaattaattagtttattacctttgacaggtttgatgaggtacaattagaaatggtttaattaattatgataaggagtggtatgattgataaggaatagtttaattaattatattagggaatggttaatattgtaatataaataagtatgatatcctgtataactttgtataactctcttctgagaggagacattaatcagagtattagttagagaagaatctactaattaataccaaccgtctcattgctatctcgctgtctattacacaaataaaagatccaacgagtaaactatcttatacttattacttccattacgtaattaagtattatccactatatcgtatattttagtttacagacgtataaaacaatgtggtcctttcagtagttttattcttgcttacgtaagcatattgtaaattgcaaaattttgccttaaatttttgaagaaacacatttaaaccagttaatatttagcatttcaaatttgatttgtatttaaaaagttatttttacaaacatcattccattttttttgaagtacccgtattaagattgtttaattgtacctttaaactaacaataatctttataaatacctagagatatatcacaattacacataaatcaggtaaacctatcatttaaattcttttctttgaattccacaatccattgatttaaattaccttctaaataagcttcagaaatttgattaaatatcctatcatttattttaaatcccaattttgttaattcaagaacagtttgtttaattttaccattaattgatccatcaccactattatccttattattcatgttctggttttggtattctttaactatctgctttgttattaatgcatcttcttttcttattcttatcaaaaatctagaattcttcattaataaatcttcaggatcggggattactttaatatcattatttttcgttataatcattgtattgtaatcttcaacttcacctagtatcaatcgatagtatggtaagttattagatgtttcttcaattaatgaaaacattccattttgtgttaatgtatgtgtaaaggaaagggtattttctgttggattatattcaatgtatttaccatcactgcttttaatagaaaaaaatttcttttgttttgatgaaccattgacaaatttagttgatgattgaaataatgtagatacatcatttaatatgaaaacgtatgaaacatcctttggttcaactctgtatcgtaagttttcattatcaaaaacatcattatctgtatactctattatatttgatattagtgatttttcaaaatcttcactgaatatcaattcacttttatcttcatttgatttaatcgttttcaaacataacattttatcttccctttgatgagttatcattataggtaaatttcctgagctttcatccaaaattgaatgagatgcagcactaagatctctattatacattgttgtccatccattagtaactgtctctatattaatatcacaaagtttctgttgtttaccgttaattgggaaggatttatcattctttgactttattgattcatcatttttatgtacttttactttcctcttcttctctttctttttatcacctttgaatataagttttgataccattaccgatgatggtacccaaagtaaaaaaataacataaagaaatttcacataatcaaggatgataaaatattttactagcgattttaaatggttcactgattactagacaagctctatatacgattcgattataaataaataagacttaatcgatcattgatttaacaaacgttctatatcatcagataaactcaatggagttttcacacttgaatatcttttgaatacttcaccatttttagtaactagaaacttttcaaaattccatttaatccctttaaatcctaaaacaccaggtttttcaactttaatccattcatataacggtattgcatcaggtccattaacatttactttattcataattctcaaattaagtccaaattgttctttatatattttagcaatttcttcattagttccaggttcattattagcaaactgattacatgggaaaactaatatctctaatccttgttgatggtatttattataaatttgttcaatttcctttatttgttctttaaatccacataaagatgctgtatttatgataagtataactttaccttcaaatgatgaagtgcttattacatctcctccattttgcactatatcaaatgaataaaattttgacatcggtactgaaattgattacaattgaaacattgagatctcttaaaaatgggtttattaattataaaagttcagagttaaatgttcgtaatacaatctattatatatccttttttatccagttggtctagaagtgtaatggcttaataattctaattaattatggtattcgcactcagtcttctctcatcagttcttacttttgatccagtctttaacaattctgacaaattcaagtttacgttccgtgactaaccaatgacctgcatctattggttcgacgctgtactgtggaaaatattttgatatagcatgagtgtgaatatcatttcctacaaattttgaataattagccttaataattaataaaggtggggtttcactttgatttgctaatggttctaaatcaccaaaattttccattctccattgtaatacatcttcaattgaattattcagtacctcgaatggtactttagctattaactttttatttttagatacgacattagaaagccaaaaattaacaattatttcatttggttcaacccattttttcaaataatttttcagttcattcaatgaccattctggatgtgttttaatacaccaattcagagtttgtaaacctatatgaaatttttgaaattcaacaaatgaattttctggattggtatatggaatattatcaattgaaacgacacctttaatcgtctttggatatcttaaagcatgaatcattgcaactttagcacccattgaatgtcccaatataataaatccgtgatgtcttggaattgtagacggtagattctctataagtttcgatatatcatcagacatagtcttataattcattggtacagcatggaaagatgttccatggtttcttagatctggtacaataaagtgtgtatttaattgatcagataataattttgcagctgatctgttgtttcttctattccccaataaaccgtgcagaaagataactggtggtaatgacgacttctcttttggtgaaaacaaatcatagtctagaacaccaggtacagaagtataagagtttatatgacgtatcccctggaaatttctagactgtatatttctaatacttatcttaaacatgtatcaatccccttgaacaatatataacttataataaaacttcaaccattgatgaatattttctgaaacaagttgcaaaccaacatggaaatcttcccacagtaaaatttcccatcggtaaaacgcggaataaacggtttcttagaaagttgacatttccgagattttgtatttttttcggaaacacttttgctaccatcacttatgtttcatttgagtcataggattggggaggtatctgtatattgactggagatgatctctatttataaagagatgcttatcctctgcccttttgcaaattataagttttattgaagaatccatcatcttgtaaaattttgagcttcattttttcttttgctaacttcccctttaaaaacaaacatatagcaaataactaacaatgattttctcttgtggattatttatgataaaaaggacaccaaagcttctatgcacacttttaacaatagttaatattattatgatattttttgttatgaatggtgcaactcatgattcatctggttattcaagtttatacctctatgaatatcaatttaataatcaaagtgatatctcaaatttattggcaacacaatatagtcaacaacatgatggtaagaaattatctgatttttcaatgaaagtcggatttatgggtgtttgtgttgattttggtgatgatttagattgtggttatacaagtgatatgaaaactgattatgatgataaagttccatcattctctgttacaaataataaaaatacaacatctagtgcaactcttgaattattcacattagctgaaactttacagaataaagcaactaaatatcaaatatttattgttgaaataataacacttcttgttctattagtggctcaactttataatatgattagctttttaccatttcaaatttatattcaatggtttattttatttgttttaacagtgttctttacaataatatgtatttcaatttcatgggttatgatatcatgtgctaatgtaatgaatttaggatctgtgatgactatgaatattttatcatttgctcaagggaaaaaaccacaaagtgttttatgggcagcttttgcactttgtatcttacaagttattttttacatatggacaataattaatggtgatttttctggttccaatttcagcagaacaaaaaaaccatctaaagatatggaaaaagatatcagcagtattgatcatagtattttaagtagtatcagtactttaagaggtacgttatagacaaaaatgaatttctttaatataccatttcatggttgattttctttatatacctaagatatttttctttctctattttttctctggtttcaactttatataatatcattcttttaatagcattaccttataattctttatccattttcagttaaatgtaaccattgttacaccatcttatcacgtatatctcggtgtaaaagtgggatcctcggactaaggtggctcagatacgtaccatttgtcccaaaagggaaggcgcgccacaattagtttcttatctttagaggttggctcatcttaaaattctattttaattactataaaaagagggttattcctgttttagaatttgccacccaatttgccacccaatttgttttatctttttaattgttgaatttatattgttatttcttttctattcttttagaactttaccttttgctaggtttataactaaaaacaaactacacatcacaatgcaatacaaaattcaaagaaatacagctttacaacaaggttttaaattaaaaggtggtatgcaaatctttgttaaaactttaactggtaaaacaatcactttagaagtcgaatcatctgatactatcgataacgttaaacaaaaaattcaagacaaggaaggtattccacctgaccaacaaagattaatctttgccggtaaacaattagaggatggtagaactttgtctgattataacattcaaaaggaatctacattacacttggtcttgagattaagaggtggtatgcaaattttcgttaaaactttaaccggtaagaccattacattagaagttgaatcttctgacacaattgataatgtcaagcaaaagatccaagacaaggaaggtattccacctgaccaacaaagattaatctttgccggtaaacaattagaagacggtagaaccttatcagactataacatccaaaaagaatctacattacacttggtcttgagattaagaggtggtatgcaaattttcgttaaaactttaaccggtaaaactatcactttggaagttgaatcttctgatactattgataatgtcaagcaaaagatccaagacaaggaaggtattccacctgaccaacaaagattaatctttgctggtaagcaattagaagacggtagaaccttatcagactataacatccaaaaagaatctacattacacttggtcttgagattaagaggtggtatgcaaattttcgttaaaactttaaccggtaagaccattacattagaagttgaatcttctgatactattgataatgtcaagcaaaagatccaagacaaggaaggtattccacctgaccaacaaagattaatctttgccggtaaacaattagaggatggtagaaccttatcagactacaacattcaaaaggaatctacattacacttggtcttaagattaagaggtggtgcaactgtgtaaaagtaacaatttttttatataaattatgtacacattattctaatgactaaactctacattgtttatctaatatttgactcactcaaaatcttttcacattcaatagtaataactgaattaacattatcagatttcattactttaagggtcatgatacaattatttctttgcgtttcattcatttgaagttttccaataagtaaacctgtcaatcttgcaaacagtaacatgatggattgtaaattgtctgatgtaccagtgattttctttgaaagttcccaaatctcatatattttatctgtatacagttccttttcggttttgttgagaatattatttttatttaattcaactagatcagtaatgattgataaaatttccttcttgtatttgaatttactatctgaattaggtaataaatctgcatcagtaaatttgattaattgaatcatttgatttaatgcatattccaatgaatctaagtttattctttctccattgttgatagaaaaaataacgtttttgattaatgattgtttcaaaataacatatttcaaagaagattttttgctttcgatagcatcaacttccattttattcacatcatccagatcatcatcagaatcaatatcttctctatttaaaataccatcaactagctctaaatgtttcttatataatgtattattttcatggtatgtattcagtaagttacctaatgcaataatactgttgatcttatattctctattgtttctattacattcattcaaaactctttcctcgagttgagtgtataaatcatcattgtttgctaaaaatttatgtgacttgcatgctaatttgactaatgaatcaagtaatttatctttaccttcaaaaacacgtccaactaaagagtcaaaaaggatttggtataattgatttaaatcagctggattcaaatcattgagtttggtatctaatttgtcgacaatctcaataattgatagtgcaatagtttttcttaatgaaaatatttgagtttgaatatgtgatttaattaatgatatgatttcagggaagtataatttaattgaattaacacttgaacttgttgagtcatcccaaacctttctgaaattcttggaaatatcggagttcaaatcatgcattccaatgaatgataaaggtaaaaataatgaggcgtgagagttgaatttatcattggaaaagtttgaaatagattccagtgcaacagatgatattcttggtaatttttcttcattactagattcgactttcttctcaaaatagtatttgattagtttctttccaaaagattcagtttttttaacagatgcaatacgaatacaatatccggctgctatagcatatgatctagcaacagtttcattcttaccacttaattgtccagatgcaattttcaaaagttgatcaccgtatttatttacaatgaaaaaatgtcttaaaattaaattcacaataattttagagccagcaaccttggaaggtaagccaatggcacttttaacactttggccaaattgttcaatgaaagtctcaattgtattttcatcaagtaaatccattagtttttctatagcttccatcattggtgagctaccaaccataccaagtctttgagaatcaatgtcttcaacttttaaattgtacttatcagcatttaaagttaaataattaatagcttgaggttcaactgacgtcattaatgataccatttgacaaataatttcagttacgaaaggttttaaactctttgatgatgttgagatcaatttcataattgtatcaaaggcaaattttttaacatcttccgattcacttaataaaccattattacctaaaaagaatgggacaagttgtttaagaatagtttcggaatttgttttattagaggtactgtttaatttcataaccattgtattagctaaaaatttagttaatgaagtaccttcttttctaacagaacttttaatatcatccattgagcggaatgccatcatccaaattttctctaaatcatcttcaaaattactgaattcactttgtctcaacaagtcttgtaaacctgcagcactagcttctctaatacgccattctttatttcccataccagctaataattcatttcaggattgaattgaaatttctactcaaagtttccttattatctgaaatcaaactattccatatattctccattgttcttgaaattgaagtacttggatcatatttgtatctaaataatttaggtattaatctttctgataaagatggattttcattcaataacttatcaagtttttccttatccaaaattgcaccctaaaccaaatgccaaacctttctttgatgaccataaagcagaattcttagctaatgacataaacttataaacaagactaggattaccaacttcattagcaagactcaaaacatctttatatgttgaaactgattctcccatcacctgtatttaaaacaccagcatcaaataattctgtgtcctcgtcaacataaccattcatcaattcctttgaagtcctattggaagtctgtaaatgttctcaataaattatgaacaagagtttcttgtatttcatagccacctttttcataagtaatacttaaccctcttgatgcagcttcttgaacaatttcttctctattagataagaatctcataaaagaattttgaatttcaccaattctttcgataataacttcatcagtacaatattgaacaatagacaataaccaaatacatgcagcttttcttagacttggtttcgtttgctttgatgcaaataagattttatctaatatgattgaacatctattaggaaactgttcatatgaattgatagaattaggaatatcattattatctttcattttcaaagacttccatccatcggctaaaatactaaaaccttccccactagtaaaaagattatcaatttgttttgtcgtatgagtttcaaaaaggatagactcaaaatcggtaaattcggctaaatgatcatcagttttatatgttaaagaaaggtaacaccatgtataaatagtagattcatgtgatttttgaactaaatttttcaattttggaattattttttctttaaatgaatcaacatttggtgataaatttaaagttggacctaaacaaccaaacatggataattgtgaaatacaatctaatgacatatttaatgatctacttgaagagctacttattaatccattttcaacaacaaataaaatcctatcgaataattcacttgaaataatatttattcttgaacgtaatgctaatcgtgaaacaataaaaccaatagtacaaattgatttcttttcaactagtttatttaaaatctcaataatggattgatcattcactgcatatgtagttgcaaatataccagtcaatttagatgtgtaataatatgattcatttgataataaatccagttgattatctaaaagtgatggtatgtagctggttaaactatctgtgacttctgagctacataatgatattaaccttgttaaagttgctaaaacattcagactagttgaggataaaacataatcaagtgataattgtataaatgaatataatgaactactagtaaatgattcaacatgatcattatcaacatcagtaaatttggataactcagttatcatactagttttaacattctgatctaattctaaagctttatcaactcttgtttcccaatactgatcataagtaattatagtatttttactatctgaaatggaattcattataagacaacggaaagtaaaaatgattgctgtttcaaaatctataatatctttatattttaaaatatatttaaccattgaactaaataatggcattttaaattcttgttttgcctttgtatctggtaaaagattatcaattttattaattttaaataaataaggatttagtcctttctttgcttcttcaattgtttctaatttatcttgtttggaacttgctaaaatgttaatgattcttgattgtggatcatcaaatggaaataaataattgatgtatttaacagagataaatctaataatgttaattgtattatcatttacagttctttcatttgaatgatcaaagatatcaattattaaatcttttaatttgtccttttgatgttcatctaaagaatgtaaattatttgttaattccattaaaacatcttgaatggttggttgaagatctttttcttctgattttatcatatcaaataaaaattgaatataagggacatctaatgaaccgtttgatttctttaataataatcccaaagtttcatattgataacgacgattatctaaataattagggcttgatttatcggctgagatatcggataaattcagctttaattgagaaccaattttaaaaattgtttcatcatttgtatcagataatgaattcatagtggtaaaccatttaacaaatgcaacagttgattgtttcaatttcatattagttgaatttagtccaattgaagaaattttatcaatttttgaaccatcttgagttgcaattttactcttacaaagaatagataagattttttcttgtaattgagatttaactggaccaatttcgccttcaccaatgaatagtgaaattaatagattaataaatttttcattttcataatcaattgcacttcttttgaataaagtagatgagattgatgaaacctttgaattaccatcagtagctgcaattaagaaaattagtgatttataaaaatttgagaattgaattaattccacaagtttaatcatatttagtttataatcagataataatgttgaattgaaggttacaccagcataatatgaaaagaaagagcaatcatcttgagaaagacctggttgtacgatgttatgtggtattaaaccattagagcctactgaaattgggtttaataaggcaaacttataatatttgatcatcataaattccttatcaacatcattcatttgttggaaactttcagataataatgttaagaattttaatttttccttttcatcattagtttccgtaattaaagaatttaaaattttacaagatatattaaataatcttgcactaattgaaattttaaaagttgaaatatccattgaaagtttaggaaaaatatctaattgttcatcaattgataatcttggaattgcctttgataaaaataaaagggaataagattgaacaattgttggatcttcatttgatttaatatttggagatttaatttgattaagtaaatctaatacaggtaattttaattgaggagttgcattgaatttagataataaaaatttaactgttttacctaattgaagtttaacatttttatcatttgaagtaaattttaaaagtaatggagcaagatatagatttaaagcagattgaaatttttcatttgaatcagccaatgcaaatctcaattcaactttttgaattagttgaagatcatgattgggtgaatccatgattgattttgtttactttttaggaaaaattcaggtaatttaagcaatttacagtaaaaatcaagatatttcaagggcaaattcttataatatctccaaaataggcaattttccttgattccacattattttaaatatttgtgattacgtaagtaaaaaataaatttcacgtgtctaaaagtcgcgtctgtgcgtatgtaatgcttttctagaatttagatctatatttcaccatgatgttgttacattgcatgccagtgaatagatgaaaagacacactacatgaatgaagaaaagaaaacaaagataattataagatgagcatgccccttagaccacaaaaatgtaaattcaaatactcaatgaataataaattagtacctaccatcctctaaatcttagtatatccggtctattaaatagagagaacgcgcagaaggaaaaaaaagaatcaaaattttaaaaaatgggcagaatattttaagctaacataataataagtgagagtgagcactgttctgtgaaatttttgttaaataattttgattcagtcgtgtgtgtgtgttggaatttacaagatatttcatttcatttcattgattttaaatttattgaattatatttatatcttcttttcctttgtcaacagtttattcttgttctcacttatacatatattacactacttcactacttcttctctagtagaaatagttctcaatttccaccattaacccctttactcattgactaactaattagctaatcatttcatttgaataatgacaattactgatagaattaataaaaatagtaggcctagtacaagggattctggttcaacattaactaataattcaaatactacaactagtaataataataatattgttcataataattttcataataataatagacttagatcagtttcaccatcattttctaataattcatcatttattcaatcaaataattcattaaaatttcaaaatatacgatataaaggtaaattaccaattactgaaatacctgaattaaatgatttatgtaatgaatttttaagggataaaaatattacaggtttagcaatgcttgcaagacaagctggtttaccacctcatttaagatgtaaaatttggccaattttattaaaatatcatccttttgttcaacatccttacttagaattagatgatgatgaggaggaggaggaggaggatgaagaggatgaagaggaagatgacgaagaggaggacgagggtggtgataataataatgataatgatagtaatagcaataaaaataataataataataataatcatagagacgaaagtaatgaaagtagcggctcagaatcttcatcaaataaaaaatcaaaggacacttataaatataaaatacccattaaagaaatcaaatttgatttaaaaaaatatttaagatcttcagagagatatgctccaagtgttttaacttcagagattaaagatatgtttgaaattcaaaataaaatatttgatataattgaacatgcaattataaaatttttgaaaaaatggggtaaaattgttcattataatccaggtttaacatggattgctttaggcttagctgaatgggtaccacctttatcaacttctcaatttgttttatgtggtcgtgatgatattgctaaaaatggtacaaaattgaggaatataaatgataattattttgaaaaatttcataatctgtcatcttctttaacatctgaggcatcatcagttttcgaatctcctcataccgcatctccaaaatctgcaactcctttatcaagtcctttacaaacccctccaagtgcctttaaaccaatgtcatttgccgaaatttatgaaagaatggtattggttatattatattcaccggatcctgaaacaattgaaaattatgctaaggatcatagtactgataataaagatcatataaatgcaaataatagtattgtagataataataataaatcaactagtgataatattaatgataataataagtaataacaatggtaatcaaaataaaaatacatttactgctggtaagacaaatgaatttggaaaattatcgacattaccatttactggtggattattatctgatagaatttcattatttttattttgtttaagaaaattattacctgaacttcattcacatttagttgaagaagattgtttaaatggtgattggattttatggtggttaaaatacgatggtagtaaagtttggtcaaggtatgatagaggtagaacatgggatttattattaggttatagaactgattgtcaaaattttgaaattgatatgaaatcattatctcatttaacacctgatcaagttagattattaggccaagatttattctggaatccaatggataatataaatgaagataataatgaaattgataatggtaatacaacattaaaggaaaaagagaaagaaatactgaaagagattgaagataatgaggatgcgattgatgatagatatgatgaatcatttggaattgagcaacatgatagatcattatcaattcttacattaatgtcaaaaaatcgtagtccatcattatcaattgagaaaactccaacattatcatcaatttcattaaattctccaaataccccattattaagtttatctgaaataagtaataaagaaattgaggaactgccaccattagataaaattgatacaaaagttgatataccattttcaaaagttcatcctcatgttgaaatgatttttataagtttagcatttttgaaaagtaaagaatttacaattacagaattagatcaaagtgaaattaaaacattatttaataggttatcaagtttaagaacagatcatacagaaattagttcatttataagtaataatacagaggaaggtgatgaagttaataaaagtaatattaatgaaaatcaaagtcatgaatcataatcatgataatgataatgatcatgatataaataacacagatggtgatgaagattttgaaagtttacatacaaataattataagattgatggtatggttccaacatatgttcgtaaatctaatagagatattgagaatgttcttattgaagcaggtgaattatggaggaaatttctttatatcagcatggttgaagaatctgaactcgtttgaattctgctaaaaatctgttatattattattagcattaactttttttttgtaaaactttttttagtgtgaagaagagaaaaaagaattttcctctcataatatgaaatacgagaatgtaaataaagcgaacttaatactgatatcattgttaggtttagttttttatagagtttctgtacacaaagtaaatattataaacagagttaatcaaacaaaacttaaacgataacaataaatatttttttttggattttttagattaaatttgaatcaattaaatttaaataactaatgttataaaataagataatgaaataaaataaaataagtaaaataattaatttagtaagacaatgaaataatataatacaattaatgaattaaatggataaataataaaataaagttatattgtatcagcttaacttacattaataaagcacctgcagctaaagcagcagcacctgcagcatagtagttaccgtaagcaccgtttgctgcgttatctgaagcagttgtgatagttgagttaccgtgttctcttgctggacaatcagtaacttctggaccacatgaggtgatggtttcagatttggttgcggtttcgtaagaagttgcagctaaagcagcggaagcgaataagacgacggaggtgaattgcattgttagtgagtgacttgggttagacctttggttataaaagaagaaagaaaaagaaaagaagtataaaactcacgagagaaaacaaagaagaagtgaaagtaaacaaataaagaagaaaccagacgagtgcacaagataattatgataagtcataaagttggaaaagaagggccttttatttggtaggaaaaacttcaactttgcagaaaatgcgactggaaaatattttcaccgcgctgtttgtgttttgccgttttgggaaatggctggagatacaggtggacaccggctcatcgacccgatttgaagaatctccgattatgtctctatgacactgattttgttgtgcttgctggttttttccaacatgaattttattaatcagagtaggactgctggttgataaagatttatcagttgataattactggtttgataagcattaatgttttgtagaaggattctaggccgttcgttacgacagaaaagatatttagggtcgtcatcttccggaataccgaataacttcactatttcatctcaaccaactaagcataacaatactaataataataataataagaatacatcttttaatcttgaaactcatgatatcgcagaaactttacaaaatgatcctaatttagaacttttctatgatgcaaaaacattaaatgaagtaaataatttgaataatccaaaacctgaaacttttgatccttatgatttttcaagtctacctacctatactactcctgataataatattacacattcaatagataatgaacctcaaactatgtcaactgaagattttatgaaaatgttagctgctgataatgctgaatctcctgatgggattttcttttcggataaggaaaataatcatgcatcaggacaaacaacagatcaatttttggaatcaatgattcaaaataatactactatttctgaaaagaaagttgtaagttcttcaaatccaaaacctcaacgaacaaataccacctttccaactactccaaatttagaactacttgaattcttgaaaagatttgaaatacccgaacatgatatattaccaaatttaaaaccaattgaaactataattaatactgacttacctctgattgtaatttccaaattaacagatccaagattaaatcttagtattgaaaaatatatttatgataatttcccagatccgaagaatccaataaacagatttgctagacgtttagtgctgtacaaaaactctaactgtattgttctgggtaaaaatcaaaatatttttagagaagttaatcttagattagcatccacattatccattccaattttgagaagattttcaggtggaggaactgttgttcatgatttaggtaattataatttctcattcatgtgtaataaaaatgaattttcaagaacaggatttacacaagaattgatacaaaattggaatcaacatgatccacacaacttagatcatcaattgactgttaatgataaaggtgacatggttagacaaatagatttgaaaaaagttagtggttctgcatttcaaatttcaaagggaaaatctttacatcatggtaccatgttactaaattcagatttgaaaactttaggtaaattgttgaagttaaatgaaacaagagcttctaatatatctgataatgcaacaaattcaattccaagtcctattgtaaatacaaaaataagtgaagatgatttcattaatattataactacttcatttacaaataaatttggtttacctacaaatcttaatgtttctaaaataaataaatatgataatttatatttacataaatcaggtaatgttgaatgtcaaatcttgaaaatagatgatttgattgatttacctagtgaaatacttgaaacttacaatcaattgaaaagttgggattggattttcggtaagtctccaaaattcaatataaagataaatttagataatgattcattgaaacttaaattctttgttgataaaggtagaattattgctttagagtatgataaattagatgataatgatacaagattagattcattgattgctgcattatcaaataaggatgaagttgttaatttttcaagtaaatcattatcaatgtacattaaagaatcatcattaatgaaagaattatcttggcatgtagatcaatcattaaattatggaaatattggtatttctcattaactatagaatgttttgtaaatattatgcatgtatatagagtagttattcggtcttttataccgtatattgtgtttagcataaaaaaagttaataagctaacaatggataaatcaaaaaaccttaattttggcagtttacatacaaagtgtttttcaaattggtgttcccatttgggagaaatttacagaacacgcagaaagggacagaactttgccatacaaattatatttttcactaataatacgaatttcgaaagcacagttctgtaaatttttaaaataaccacacgccagagcattgtgccaattttatagttacatttaagctatttacgaattttcgtaaattaaattacgtatttatcttgttcttttcaactactcatccatcattatctattaagtctctagtcttttatttttagaaatttgggttgcatatttctttcttgtacgacgaaatggttcttaattagtgatttttcctgtaaaatcaattgaactgtgttttgttgtaatatgttcaaaaatattttgtaatcatgggaaaaaatgtaaagttggcgttgttaccttttctaagtattttatttctaaataggtttattgtttttttgtcttttcactgaataaatttaaaatttgaaaacaagtgcaaaatatttctgtattcttgcttttttttgaatttttttcaagtcacgtgaccactaaaatctacttacagaaaaaacttcaagttttaaacgtcaataagagatcccttggcccagttggttaaggcgtggtgctaataacgccaagatcagcagttcgatcctgctagggatcaattttttagatacattgaatattttttataatgttgaagtaacataaattcaaactatttttttcattcttaaaattatggtgtggtatatttagaatagttatcaaggattactgaaaaggattgtatgtgttggcttagtatggcaacactgtgaaatttatggctcgtatagtaataagatattcggatacgaaaaataattttttccatgattttttcaactgtcaacaacactcaaaaaagaaaaaaaagcaataaaggactcactcaaccgtgttttttttcaacaaaattcaagctttttttttctttaaactttaccaatctgtcaaagagacaataaactaacatgtccgtatcagaataccataaacttgttaaatcattaaaatccgatgaaatattggatatgtttccagaagttattcctttagagcaagcatcaggaatgtcatcaagtggaactcttgaaactgatggtgataaagatgttttcagtggtcatgatatagaacaaataaaactgatggcagaaaattgtatagttttagattatgatgatacacctattggatcaggaactaaaaaattatgtcatttaatggaaaatattgataaaggtttattacatcgtgcatttagtgtatttttatttgattctgaagataatttattattacaacaaagagctactgaaaaaattacatttgcagatatgtggactaatacttgttgttcacatccactttgtgttgatactgaaatgggatctgataaaggtgatataaatttattagaaaatgctgtatatggtgctaaagtcgcagcacaaagaaagttattccacgaattaggtatagaagcagaagatgttccattaaaagattttaaatatttaacaagaattcattatatgtctccaagtaatggtccttggggtgaacacgaaattgattatattttaatcataagagcaaatgctaaagttaatccaaatgtaaatgaagtaagagactttaaatatgtctctaaggatgaattaaaggcaatgtttaagaatcctgaacttgttttcacaccatggtttaaactaatttgtgaatcttatcttttcaaatggtgggatgaccttaataacttgaaggaatcaactagtgacaacattgatcgtatgctttgattttgatttcatgactaatatatatgtaaatgaaaaagtactgaatttccaatatttataaatagtatggagttttgaatcttctgttgtactctttcattcaaatgattacaatttttactatgattgtataattagtgcttccacttttttgttttgtttcattacttttataaaatcctaatatataaagtgttatagatagctgtttgatataataaaacaaaaacctatatatcagtgcttatccacgtttaatgtacatactgatcttacctttatctctacacttagccgttgaaactatacattacctaagacgctaagacagagtcactatcccgagattaggcgcggtccagtttcagtgtacaaattttttcttatcaggaatttccctgttaaccaaaatcgggttccctcaaccgcaatgataagaaaaatttaaattgtaattatctattgtttagtcaggttgaaatcagtcaattttcactggttgtattgattttgaaatttatatgaattggcctgagaaacagttttaagtttgaaattatttttaaatgcgttcttttttaattgacagaggtgttttaataaacaaaagccattgatgctacaaattcaaaatttaaagactgaagaatcacttctgcttgcaactacagttgtttcacttatttcaattccatcaatctattatttttttaacaacaagaaaaatggtaaagctaaagctgcagtaaaacaggaaaaagagttccctaaaccaacaatagttccagtatctgatgattttgattgggaaaagcagaccccatatccatatagaccttataagaaaggaccttataaaatgaatcttgcaattcgtaaacttgacccaaatgatattatctgtattgaagatacttatcttgatagagttactttaagggaaaaattatttgatgagaagaaattatccggatttcatgaatctgctttagattctcttaaagaaacatacagatttatttttaatcatttattacagagatatccaaaatactttacatattccgatgacaaaaagacaataattaataaaataaaagagagttctgttcctgctaatccaagtgatcttagtggtaatgaattactaagaattattgcatcaaatattgaagaagatatgcttttgttgatcaaaaataatgatgaaggtgaacctgatgaatatgttttaagggcatctacttcattatttcctgcaggttttaatccagctcagaagatgaatttaccattaactaaaattcatacaccagttcctcattatgttgaaaagctacaaacttcaatgaacaaatttttttcaagaattaaaccatatgagtttattatcagaaacaactggtcaattcaaacacacaccaatctttgtgcaccaactggatctcatgcaacaaaggaagaagcaacaactattcatccattatatccacaagatttagattttaataaagttttctttagagttgaaaaacaatgttttactagattaccagaaacgggttcagatcttatgtttattagaacttatgtaacttcattaatggatttgagaggatcactcacagaagaagaaaaggaaattttatgtagtgctattgatggaataatgggtgattttgcaatttataaaaaaagaattcaatggggtgaagctgcaaaagcttttataatgggagaaagtaatggttctaacccggttaagactaaatatacttttgttagttaaatttgtttttataagtcatagttatatttagttactttttttataaatttataatgtttaacaataaaaattaaatacgtaacgggtcttttaagaaatgtcttgcactatttaattttgtaaaaacagttactatcttatataagatctaagataaaagaatttaaactaatggttttggaacaacatcatcttttgaagtatctcttttctcaccatattttgcaaaaccaagataacctttgtttgtcattggagtatagaaagattctctttcataattagttagttcataacctttctttaatctttcaactaaatcaggatttgaactatagtgacgtccaataccaattaataatttatcatcaccattaacaacatcctctaatttattaattgtgtttggatcaacataaccaccgtttctaattaaaatacctttccagaaaaatctagcccatgacatgtcaattttattctcaacttcaccagttgggataagttgggatctaggttcaacaactgaaatataagctaactctttaccttcattagctcttttttgtaattcacctaaaatataaccccaagtaacaattggattaatttcagaatcttcaccttcaccacccataaatttcatataaggagaaaatttaattccaacacgatttgcaccaattgcttcagtaagagcatcaacaatttctaatacaattcttgctctattttcaattgtgccaccatattgatcagttcttttatttgagccaggttgaataaattgatcaattaatgtcatatgagcaccatgaatttcaacaaaatcaaatccagattcattaactgcctttttagctgtctctgcaaaatttttaacaatttttttgatttgataagttgataattcctttaattcaatatcattatcctcaaaatctttcttttgttgatcatccataaagattggtgaagcagcatagattggatcatacttaccattagcattttttttcatcatcattgaatttgccattctgccaatataaagaagttgagctgaaatagaagtgccatgcttatgaactgcatcaacaataattttcatagcatcaactgttttttcattactccagcttggaaagaaaagttgagatgtaaattcttcttcaacaagtgcaccttccataatgattaaaccaccattgttttcagcacgttcttcataatatttcaacatagaatcagttggaatatgatcaatagtaactcttgaacgagaagttggtgcatgaacaactctatttttcaaagtaacagagcccactttaactgatttgaataaatttgaattttctaatgtcattttattatcttatgtcttatcttgtttgttaatgtttaatttaagccacaattttcaattttcaacatatcgatatttgagaagtttcacccctttttatagcacaatttcaattagtaatcatattcattcacttaacaacaaattgcttaattataaatcaaataatgtgaattagagttgtcaatatcagcaaattccgttatcatccttaaatccactaaatttttctttaattccgtcaaaaggctttatttgcttacaaatacaagaattgatacaatagacaaacaaaaaccagcaagtatcttacctagcagccctaaactattagatatgcaacaaaggatcaaacaaacaagatatccaaaaaaaaagcacaaaacctaaagaaaaagttgaacattttggtagcaggattttattaatcatgatgcctcatgataagaattcgatttaattttagcaaatctttaaatttccaattacgtaagtaaaaatattacataagcactataatgtttattattctttaaaaattgtattacgtaacaaagtttatttaaacacgcacaccctgtagagattaatgatttcagattggagattttggctgaatttcaaagcttgtaactgcaagacataccttctttctgtcgtgtttccattcatctattgatctatataagagtcaattaataagggaagtgtataatgttttccaaaatatcacaaattggtaaaacatttgcagatgaaatcaatagaatcaatgacgaagttaataatccttcaaatggtcaacaatctcaattagttgatcctgcatcagctaaaaaagtgttagatactaaaactcctgatgtatcagaacttgaaactcctgaaaatatgaaaaaagatgtagtgactgaaaatgttttaacaacggcttcagatgataatacaactaatcaatcagatgtatcttctaaattagatgattcaaaacttaaaaacaataataatgaaggagaaaataaacttaaacctaatacagatgataaacaacaatcagagcaagttgtacctggtactcaaataaaattttcctctttaccacctgaaattcgttcaagattagtaaaatatgttaaatatgagaacaaatatccttcattatacaatgcttataaaattgaaaaaaagaaatcttcattaattaaagcttttgaaaatatgttacaagagcaaactccatgttcaagtataggagaattagatggggttagagattatttacgtagtttaacaagtaaaagtgatatgttaacatctgaattagctaatataacaaaggagaagaaaagtgcagaagaaaaagctgctacattagataaaaaagttgaagaacttcaaaaagctcttactactggtagagctgaagatagcaatgaaattaaaaatttaaaagaacaattgagatcacttaatgaagaaaaatcaaaacttcaagagatacaatctcaatatgaatctttaaaattagaaaataaatctttattagacaaaattgaacaacttgaaaatgagaaagtggaatcaaaggtagattcaaaaatggaagaggaaaatacaacactaaagtttgaaaatgaacaattgaagaaacaattagatgaactttcagaagaaaaaaacagcatcaatgaaaaattagaaagtttaactgtatcatccaaatctaatgcatctagctctgaaaagaaaaatcaagaattaaactccaaagttgcagatttggaaaaatctttagaatcctctaaaaaactgaacgatcttttaaagaaaaacttgaaaagatgggacaagaaaaagaagagaaagaaaaaactgctgagaaagaacaaccatcaaataattcaacaaatctatcaaagagtgctaaaaagagaaagaataagaaacaaaatcaaaaacaaaacaaacctgattcagatgaacccgtaaacaaaaaaacaacagaaattattccagtggaagaaaaattagtgactccaaaatcttcagatagtaaaaatgagattgaactcatagagattaaacatcaactttctgaactagaatcgaaatatagtgaagaagaaaagaaagttggtgaactcaccaaaacattaactgcaaagagcaatgaaattgaagatttgaaagatatgttaagagatgtaggtgattcattagtagaatctcaaaaggtcaataaagatacaactgatttatcaaaagaattgacaaaagttaagaatgaattagagtcgaaaaagacagaattagagatgctaagactacagaattcaactgcattaagtgattatgagaaaacaaaattatcacttactaagagaatagatgaatattcagctcaattgaatgatttacaaactaaagtatgatagattagtatcaacaaattctattatgaatagaaaatacgaagattctacaattaaaatcaatgactttgaaaaattactgaacagatacaaaacttcagaacaaaaatatcaatctcaaatcaaatcattatcagaggagaaaaataagttatctagtgaattacaatcattacaaaaatcatcaactgataatatttctaaagctagagaatatgaaaatatcaaaaatcaactttcaagaaaaaaaatctagtcttgtagaagctgaaaatagaattaagtttttagaagaagaaaagaataaaattaacgatctcatgattgaattaaaggttcaaaataaagaacttatctctaaggaaaaatcatttttagaaataaagaagaactttaactgatgctaatttgaaactcaaatctgaactcactgatagttcattgagaataaacaagttatctcttgataacacaagattgagcaaagatcttgaagaatataaagataaatataatgaagttaaacatgtgaaaacgtcatctaatgatcaagttgagttatttaaaaagagagttgaggaattatcaatgagaaataaggagtatgaaaataaaattgatataattcaagaagagttaacacaatctagaaacatgttacaagaaagaattcgtgaaatgagtacaatgagaaaattattagttgataatgaagaaactcaaaataatgatcgtaaagaattgaagttgaagattgataagttgttggaagataaagaaatatctgataatgaatatatgatgacaataaaaaataaacaacgtgaattagatgagttaaagaggaaagtaaacgatttaacgaatgcattagaacaatccgagactatgaataaaaaacttaaagaacaagtaattaaactagacagtaacgctaattcaaatgataacgctggtcatacattagaaagacaattatcagataatcaaataagtgaatacaattctaaaatgatcgaatcattacgtgaatccttgaaaagaacagagaacagagttaaggaacttgaagaagtgaatgaaaaattacgtatttctaatcaagaatcatctgataagttaatacgtttaaataagaagtataaactcttgtcacaacagtataagaggaaattttctgaaggtggaagtgccggcagtaatacaccaagtagaaatggaagctttttgtttaatactagtggaggtagtggaagacatgatagtatttctgttgcaccagacgaggttgaaacattattacatcctgatgttgtcaataatgttaccaacaacagtaaagaagaagaagatttgaaagagaaatccatttatattaaaaatgttttacttggttatttagaacacaaagagcaaagacaaatgttgttgccagttatcaaaatgttattatacatgacagatgaagatggtaaaaaacttgatagtttattaagtaataaataatttgtttctatagatagtttatgtacatgtatgtatcattacaattttatttctgatttatcatccatataaggccttaaaacttcaggaatagttatcatttttgtttctggattgtagaaattttcaataattgctaaaaccattcttggaacagcacaagcagtaccatttaacgtatgaacaaatttaagttttttatcagccggatctctaactttagtaatcaatcttcttgattggaattccagacaattagatgttgatgaaacttcaccccaggagcctctacctggcattaaaacttcaatatcaatcttcttataagcaggagcacctaaatcatcatgtggcatcactaaaacacgagcagttaaacctaaacttttaattaatgttttttgaaattcaacaatcgagtcaaattgtttcatactttcaagttcatcaggttttgtccatgagaaaagttcaactttggtaaattcatgaactctatacaatcctcttgtatctctgcctgctgcaccggcttcagctctataactacgagataaaccaaccatattaagcggtaattcattcggactaaactccttatttgaattaagtgcagcaagaggaatttcagctgtaccagtaagacataaatcatcgttttgtaattcatacacttgtgtttcattattattatctctaggcatgaatccacatgcattggtgatttctgttttaacgatggagggaggtaaaaccattgagaatcctgcctttctagcacatttaagtgagtattggattaatgcttgttctaataatgcaccatcaccaattaagtagtaccaacctctacctgaaactttggttgcctgagaaaaattaaccatattgaatctttccatgatctctttatgatctaatttagggtttggcgttattatataatcatcagtttgagatgccttaatttcatcagttggattgatgtattcaagtaaaatttgtttgtccttcacacttgaatgtatataatttggtaagtttgaaacttgtatgaataaatcgtcttctatttttttcatttcattttccttttcagcaataatcggtttatatttagcaagcttatccaatattccctcttgttgtactatattattgacattattcttcttttggttaattttgagatctttcaaaacaccttgtagggatttggattcatgtttgaaatttaatacagtttcattaattttttgtaaatgttcataatcttccttgaatgtgttttttaatgggaaagtgacgtttctttttaaacatattgttttaaaatcattatactcgttatatgcactctttaaatctaattgtgctttcttcaaagaatttgtagttctgacattaacagatgatgtggtggaagagttatatctacaaaaaatatctgcttttttcaaggatattctattaaaagccagcatttcgatcaagcactctctttattcaataatatcaattcagaaccagtcaaacaagatcagttttctatgtagcaagatatgcattttcagctgaaaattatgtgggattttcggaaaatgaacccattgcggaaaattacaatttacactgggtacttaaacaaagatagtaaaaattctatctttaataacactgtagtaaccttaatttatctcatttctctcctttttttcctttggactataacctaataaacaacaatcaaatgtctcttgcaggtgccattggagaagagaaacaactgctctcacaactgagagatagacaacatgcatcaacaaattccacccgtagtcgttcagcttcaggaaaccctaaagatatgagtcgttcgggacgatcagcgagtagtggaccagcctgcagtggaggagcttccatatccggaatctattacctttaatgatccatcagctcgtctctcaactgaaccaataaaggaagatgaagtagaggttagttcagaggaaagattaagtgatagtgattatgatttggactttcatgatgaaggtcgtgtacttccaaacttttccgtctctacaaatgatgattcgggaaatcttgctaagaaggttgacgaactcacattacttaatgataaaaccattctgaaaagagcagaatcagcaaaagtagcagattcaattcttgcatctgagagggcaataagtaatgctaaggcaattggaaggtctatccctaattcagtaatctcaagactggaggaaacagcaaaagactcaggtaatgaaatacatgtagatccagaagagttttatcaagaaaaatcagccagaaagactaagttagaggaatatgcagtttataaaaagaaattaatttcatctggtaacacatctgaatttgttgcaccatatacaagagaccaagaggaaaagattgattctgaattagcttctgttttaaattccaagactaaagtatcagatattgattctgatgtgctaaatcaacgagctatacgaacaatcacacgaggtaacttttttgaaactcttatctctaaaagtatcaaacatcctaaaagttttgtactttgtatggacttttcaacagagagtagatatgcattggaatggtgtattggaacggttttagtggattcttcagtattatacatcctgaatgttattgaagatgatgaatattcttcaatgaatttaaatggtataaatccagttacatcaaactcatcacttaatggttcatcctcttcaaatttacattctacacaatctaattcaagtaaatcgtatgcttcaaatgaacgtacgcgtgttaaaaatgttaatgaaataactaatcaagttcaagaattgttaaaattaacaaaacttcaagtgcatgtagtgattgaatcatgtcatcacccaatacctagacattttatagttggtgttattagacatatgtcaccaactttagtgattgttggttctaaaggttcaagtgcaattaaaggtgttcttatgggttcactttctaattacttggtgaggaaatcttccgtaccggtcatggtggttcgtaatagattaaagaaagcttcaaagaaaacacattttactaataatgtaacgtcattaagaggtttagcagatgctaaaatagactaaataaataattttatcaaaagaatattgaaattatatacactaaacttttaataaattaaataactcatgcaacgtaaacgaaaacttcatgatcatcatcatctcttctaatatattccttatcaaccaaatcttcaagtctcattttaatttgtgatggctgaggatgaaatcttttactaacatcttcaatcagtcgtattacttcagaaactaaaatttggtatttaacagattttccttgccttcattatacgaacaatagctgcatcaatttcatgatctcttgatttctgtatactttgtaatgtcttttatgttcttcttcactctcaattttagaatttgcaactgttgcatcaatattattattactgttagtatctggtgctttattacttgatgatgaggtagaaattgctgcaattttaaatttggtttgtggatgtttaaattctaaatttaagctgaatatatcaccggaattaattgatcttgacattggaactttctttaaaattcttgtagttggaacgactgatatactttgtaaatgtctagtcaattcagacgcaggaattcttgtcatctgttgaatttcttcgaatgataatgatttttcaccatcctctgtatcttcatcattaaaacatgttagtataacaaatgccgctaatgttggcatattgattaaataacttttacttgggaaattcatttgtaaattcattgtacacatattaggtgcccaaactaaatttctaccattataagtatttgcataaaatttctcaaaagaagctttggcaatatctaatatagggcacataattaacatcatccatcgctttattattactcattggccaaacatctcctgttaaaatggtaaaatcaatttccagtttcttgttattgtttaatctagctaaatcttttgctaatgttgagttatcaactgattcgtttttgaacttttgtgataaatcttgtgaaactttcatatctttgaacatattttcaaatttactggtaaacgttgcaccagtttcagccttaagtttatgaatcatcattaattcaagttcagttgagatagatctattatttaataatcttcttgctaaatgtgttttatagtatttttcaaaaatatctttatcttttataaatttaaaaattaaaatacaatcattcaaagttttctcaacttcatctgttggtttatttttcaaagttttctttaaacattcatcaatatacaatgaaagatattcttgaattctattattttcatttaaaaatttaacaaatgcaaattctatttctctattcatttcaatatcggaatcaaatgatttagttataatcttatcatattttgatttataatcaaggaaatttttaatgtaattaattgcaaattgggtattgttttctttattcgatgatttttttttagcagctgaatcattattcaactgagcttttgacaaacgtttaagatgttcgccattttccaaaacaagtaaatgtaaacaatcttttaaaatacgtttattagtatctattttactctgtaaaatgtaaactttttcaagtagttcaaaattatcactatcaatccaattcttcaatccatcgtcttgtaagatcaaaatattttttaaattagaggaaatcaaatcattaaacatcaaattttctaattttctagaagatgattcaggtaaatataggctaaatcttgattcttcctcttttattatttcaacaattttattaatgaaaacagatccactttgtaattgtaataaatcttcaacaatttgataataatatcgatgtgaatgaataatcaattcaggttcaaaatatttattataataactatcaccatctaagtttatcaaagattcaaatattttaataattgatttaattataaatttatctatcatttcaccatttctattcaaatcaaaatagtttaaaaaagtttccagtatttgagtaccaagcaataattcagaattttccgttattttacaattaatcaatttatcttggaaaatatttaatcccacatcataaatcaacggtagtctatgctcttttgtaaaagttctatccatatacattgcaacttgactaattaaccaagttgaaatcaaataatctgaccataacaaattcaatttattcaatacttctaatgaatctaccttattcaattcaataataccattattattgacattattatcacccctctcaattataaaatctataatattaatttgtaattttgtatttaaatgtttagaaaactcatctttaattttattatataagaactcaccatttttagataatactaaattataagcaattctatataattgttcaaatgaccattttgatgcatttttattctctatatcattaattgcatttgataaaatttcccaagactcaattggatcaactttatttgaagttccaaattttctaggtggtctaatctttggtttattagtttgaggttttattggtatcatttgaggatatacaaaagatgtttagttcaataagtgaaagaaaagaagacaatatttccaagtttgtaaaaaagccaaaatagttttgttaaggattgacattggcatgcgatttgaaaattccaacaacatgaaaattgtcgctatgagtatattttcatagcattatttagtcaattttagtgaaaaggatttttcctgtaaaattgtcttcaatatttttcctccattttcttatttctggatcttccctagatccagattgtttatgtactttatttctttatataacgacatttaagctaaattcttgctcacccaatatcaggtattcaaggaaagagtacgtagttgctcttattaataaccatcagaaatggttgattagtctagttacgggatttattatttggtacaaatagatgattataaatacatcgttccaccggccgaaagctggtctacgttgtctatctattgagtgatgttgttcatttctgtatgtgggatcggttactataagctagtaccaggaactattcacgcaaattcggcgcgtgaacgttttaccgctaagtcacatactattaacaaaccgacatggcacccatgctgggaggattggagtgtccgtaactagatgatatgaaaaagccaatttcgtattatatttctaaacaaaatactaacaatttatttcgcaatacaaaaagtttcattccataatgaaaattttcctattactattttatttttgaagattaatttaaacaaaacatcatttaaagaatcatcatgtcaataagaactacagtagctgaattagaaaaagaaatctctgatttgaaatcaaaattcaacgataaaatctcaactttgcttaaagaacaagatgttcttaagaataatcaaaaagagttacaaaagaaaaaccaaaatttaagtaaggaagtatccgaactttcaggtttgattactacattattaaagtctcctatgcttaaaaatgaatcatcagaggataaattaatgaagaatatcgatttacaatccattgaaggtgatgctgctaggtcaccatacgttgataatatcaatagtagaatctttgttccacaatttgaaaacaattttgaattttatgaattttactttcaattgaaagacgttttcgcttcactcggttacgctaacgattttgaaaagttcgaaaatgatccaaatgttgaaatttctggtccaggtagtaagatcttagcaaattactttactaagtatttgaatcgaaaattagatcaagaaaccactagaagaattgttgcagttgaaaagaacaaatttaattatttagatggattcggtatgcttagaagattctggacatacactattggtccattcgaagacgaattcacctcatctgaaacattaaaacaaattaaatttggtgaaacagttaataacattgatgtaatcaaaaagatcatcaagatgatcaaactatctgaaaagatgtatgattgctcaaatattacatccgagcaaggctacttatatgagattgccgataatatctcagaagatatgcgttcaaaattaaggttattgtcaaaagataaaacaggtaggagattagggaagaacaactttccatcaaattttggagatatggaagatttgtacagcattctcgctttatgggaaaaacaaaacacagagatatggtataaagtctcaaacttatttcctggtgaaacggcacttattcacaatgttaagggaaatgaagttagttcaaatgaagaaatttcaaatgaattttagtacaaatgagaaagcggaattaagtggattgctggtttcaatattgagtactatatatacacaaactcgatgttatatacatcaaactaaaaagtttactattatttattcacaagctgatacttcatcaaggtataaattaaaacatatttacaatatataaaattataattagatataggattaaaatgtcaatacataatataaattaaaacaaaaccattattccaataacaaattgaataatacattttccaattttatatgcatcaaatagaagcagattgctgggaagcatctgtgcattaaaagtggaatccaaaggagcaggtggaaaatgacaacaatctgatagattttctttaccaatattttccatatgatatcaaatgaattttcgttataacatgatagttgctaaaattggacactatcaaattaacgtttataattagatgatcagaaagaagaacattgcaagtttttaattatcagcggagattacaccatcgagtccagataaacagctcattgttaactccgacaaaacccagagtttttgcattcagttagatttagcattgcacattgagataggtccaccttccatttcaatagcggatattattactatttactcaagtcgaaaaagaagtctaaaacctctatccgaaagcacatcacaaccttctaataagatgaggattttctttccatcaaattgaaattgccttatctcgcctcacgccacggggaacagcaaataactaatacatcttacagccaaatcatacagacgaaaatgaaactaaaatacatggaagtgatgtttctgtatcttagataaaattatcgatcgccaaactgcaaataatactctaccaaagaaatctagttcaattttgaaaacactgaaaaatgaaattaaacattttaaaaatagaacaattttacatccgccaagatatgtccaaggactagattgcaaaattttatacatatatattgctggagaccccacatcttagaaacgtgtggccatgatctatattagaatgatatccatctaaaaatcatatatcagacatttcaactactgatacatttaaggaattatttatccaggattgagccactgattccgacaataaattatcaggaacttaatacaaaaattatattacagtattaagatacaccatatattaaagatttacacgttgtacaactaatcaaagaagttaggaactattgtttcatgttactactcatttcaactactatcacagtatttcataatcaacacttactcaatcagttttattcaaaatattttaaggggttattttcatcattctatagaaaaataaaaacaagagggtgatatataagataattcagacagaagattatattattaagcttcaaggtgaatattatattattgaatctcagagtgtgatgtataagacaagtctgataggagattattgtaaataatcttcaaggagagaattatatcattacgctaaggtagaagattatcattatcaatcttcaagggaaggattatattattaagccaaaatggaagattatcattattaatcttagattgattaatcatatcattgcaattgtttaagatattcaaattataattgatggaatatattaagatattcaaactataatgaatgaatatattatactaatcgcccaagaaagagtgagcgaatgaaacaagggattgatatacactcacatattattatcaatgccatacattaggtattaagagggtgtgtatgttaaaagaattatgaattgagagggcgtaacaaatgaagaatagaaatataattatactatattactcagttagatttagaattatattacatcaatcagttgagtagacaaatcaattagacagtagcaacagaatattaaattgatttatgtgatagtgtcaatattactactacaagtttatggaagacactcggttatatgatattacactatcttagatggcactgcattatatgttaccattgttgctacagtatttgtatggaacactaatactaaacgattataacacataatgcactacttcatgacttttggaaattgaatactgcagaatcaatacttcaaataaatggaaactttaaatctacaaatcatactattattattttactactactatatcattattcaaatgagttgttatatacatcaaacttttaatattattcaaatgagtcgccagatacattatactcttatttcaagttgcaaaagccaaaactacataataaatgaaaactaaatttacttgacataattattttaaatttaaatatatttcatattattttgaatcatacttcatattcagatttggtaattcaacctataccaatgtttttaaacatcatggacggtagaatcaagagggtgtgtcgctatgagtatattttcatagcattatttagtcaattttagtgaaaaggatttttcctgtaaaattgtcttcaatatttttcctccattttcttatttctggatcttccctagatccagattgtttatgtactttatttctttatataacgacatttaagctaaattcttgctcacccaatatcaggtattcaaggaaagagtacgtagttgctcttattaataaccatcagaaatggttgattagtctagttacgggatttattatttggtacaaatagatgattataaatacatcgttccaccggccgaaagctggtctacgttgtctatctattgagtgatgttgttcatttctgtatgtgggatcggttactataagctagtaccaggaactattcacgcaaattcggcgcgtgaacgttttaccgctaagtcacatactattaacaaaccgacaaaaatacaacaaatcacaaaacactcacttaattgtttacagactttttctagtatatctagtaccaccacacatattctggataagaccaaagaaatgtctgatatattggatgttatgaacatcaaatcctttccttcaaaaaagaaggaagggaagggattaaatagtagtaataatgaacaacaacaacagcaatctaatgcagagagaagacaaatttatgcaccagatgaatttgcatcagttaataaacgtagaaaattatctgcaatgaatcgtgaactttacagtttaattggttcaaatgtaccaccattagctattgatacagcatcagtttcaaatgctggaggtggtaagaaatttaaagaaaaattatcaaagaataaaaatggtagtccatggagaaaattagggtttacaaatactgcaagaaatgataaattaattttatatcattggactaaatctgcaccattaaaaaagaaagaagatgagataatagtagagaataaagaagatgaaactgaaaaagagaaaaatggtgatgagaaagtaacagaaattgatgataaatcagaaataaataataaagatattgaaatggattcaactgaatataaatatagtaaatataatactaaactgaatatacctgattttaccgtagatgatttcaatgagattatgaaaattgaggaagaaaaggctaagaagattgaagaagctaaaaaagctgaggaagctaaaagagcagaagaagctaagaaaatagaggaagccaaaaaaattgaagaagctaagaaggccgaagaagctaagaaagtagaggaggcgaaaaaagcagaggaagcaaaaaaggcagaagaagcaaagaaagaaactgataaggagaaaaaagatgagcctaagaaggacaaaccacatacgaacgaaaccaagaaagacgaaggaaagaaagaagattcaaagaaggatacaacaaaaaaagacgaaacaaataaagaagaagagaagaaagaaaccagtcctgtcaaaatagagaaagaaaatgcaacaaaagaagggaaagttgatgataaaaccaaagagacaacagaggaaaagaatgatgataaatctggaaaagcaatatctaaaccagttgaagaaatcaaggaaagaccatggacatatgaagagagccaatatcttttcaaattatgcaatcaatttgatatgagatgggcagtaatatatgataattatcaagataaatatgaagatagaacattggaagatttaaaatcacaaatgtataagatatcgatatatgttttagagaaacaaggtaatgcaaatgattcagttttaattaaatcattgaaaaatttcagtaaagaaaaggaaattcatcgtaaattttatttaaataaattaattcatagagcaccaacggagattgcagaggaggaatcattagttattgaagcacgtaaatttgaacttgcagctaagaagatgttaacagagagggcacaattattacaattattagattcaccacaatcatcagcatcagttcaacaatatttaacaccacaaggattaacacaattatataattcattaatgacatctgataagggtaaaaaacgtaaagttgaaataccagttgcaccattacttggacctaatgcaataccacatacacaacatgttcatatgtcaaatcaaatgatgaataatagtaataatagtagcaatatgaatatgaataatgctaatgctaataataataataataataaggaaggtaaggatgtgaaggataaacgtcgtaatggtaatgttaagagtggtaattctaaggatacaacacctagtagtaagagtggtaataagaataataataataatgataatgataagaatttaagtaaattaagtgaagttcaattattattaaagaagaaattaagtaaggaagaattagaaatttatggaattgaattacatgaagatagattacaaccaggagtttttattagatcacaaaaaatagcatcatttaaaccaagtgttcaagctaaagttcatgaaattttaggacaattaggattatcaattaaaccaattataccaactggaccagttagtaaaaaatttgatgaattattacatcaaattgcacatttagttgatttaaagaaacaaagtgataaattaattgcagagattgaattaattaaacgacagaaaggtatataaaaaaattgtataatgtataatgttaattttaacgttcaagattaattgcattaccgaatttagcatataaagttgattttaaatttttaagattatttgataaatctgataaattttcattaattttatcaatttcaattgataaattatctgattttaattgtaaattttccattacttttgattgttttaatttaacgaaacaaccatcaccaattatatcactattagaagaggaaggattagatataccacctattagataatcaattaattcatcttcatcaattaattctaattctaaagttatatcatcaattgaatctttttcttgttgtaaatttgataatttatcattaagtctatcataatgagtcattaaagtactaaatttattaattaataattgatcatctaaagtgacattggatgagttattttgaccttcaggtagtagttccattgtgtattataggtgttgatttaatgaaattgaaaatctatacagtatagaaactttaagactttgaaaaattcatgtaagtaaaaatgaaataatagaaatcaaaaattacgtaatacacacacagacgcgacgactgtcatgtgaccaaaaaggttaaaattccgaaaggatgaattactatataatactccacccctctcacaatattgaccaatgagaaagctctgataaagaatttgataatctgatattatgatattgtgataagtggagagtactatactataacatactatactatactatactatactatactacactactataatgtactatactactatactacactacatagcatactaatatagacataatactaatatacaccaatacgagagagacattcagagggcagagtcaagtatagtaataccgctaaaaataaaaataaaaaattggccaaaaattaaaaacagtcattctattattaataatagtcattagagaaaccctatctgagggaatttttaatctataaaagggagcttatgacctgtttttgttttaattttatttttatcttgttcaaatatttatatctttcttttattacctttagcttttcttatctttgtactttctgtttgtattttgtaatagtaatttatttttactttttttattaagcttaatcttcaagcctctgctacccaaaaccccccccttcccccttattatacatatatcccaccaaaatggcatatttattagaaaaaacaactactttacaaaaatatttagatttacctcaaaatggtaaaattattgctgaatatgtctggattgattcattcggtaatttaagatctaaaggtagaactttaaataaaaaaattactgatgtatctcaattacctgaatggaattttgatggttcatcaactggtcaagctcctggtgataattcagatgtttaccttaaacctgtcgctttctatcctgatccttttagaagaggtgataatataattgttttaactgaatgttggaataatgatggtactccaaataaatttaatcatagatttgaatcaaataaattaatgaaagctcattcaaaggaaaaagtttggtttggtttagaacaagaatatactttattagatccaattgatggttatatttatggttggccaaaaggtggtttcccagctcctcaaggtccttattattgtggtgttggttctgctaaagtttatgcaagagatgttatcgaagctcattataaagcttgtctttattctggtttagaaatttcaggtattaatgctgaagttatgccttctcaatgggaatttcaagttggtccatgtgaaggtattaaaatgggtgatgaattatggatggctagatatttattagaaagagtttctgaagaatttggtgttaaagttactttccatccaaaacctttacaaggtgattggaatggtgcaggttgtcatactaatgtttcaactgctaatatgagagttgaaggtggtatgaaatatattaatgatgcaattgaaaaattatctaagagacataaagaacatattgaattatatggtaaagataatgaacaaagattaactggtagacatgaaactgcttcaatggaaactttctcttcaggtgtcgcaaatagaggtgcttcaattagaattccaagatctgttcaagctgaaggttatggttatttcgaagatagaagacctgcttcaaatattgatccttatttagttactggtattatggttgaaactatttgtggtgcagttcctgatgctgatatgtatcaagaattcaagagagaattagcttaattttttcatatccattttcaatttttttaaaaaaaaagtttaaattacaataacaataataatgatacattgattgaatcatcatttccattatacaaaaaaataaaaaataatacaaatcataacacattaacaataaacaaaaaaaacaaacagaaataataatttttttataatttataataactttattaatatcaatactttcattgtagtacattttcaaagtactaaagatattcataatttataattgtattttttttgttcttctatataatttttcacattgattagattaccaatcaaaattcaaaatttcaatgcaggtcattgaaattggtaatctaatctaatctaatctaatttaataaattttaataaatgctacttacttctacacacccactacacagtcttaaaatcatgatagccagagtcaatattacatgtcgatctaatttttatattccgcaaataaacgccattcaatcgaatttacaacattctattgttgaaagttattcacggcactcttgtatcaaattaatccgttggcattttattattataaatgataagtcatacagttattagcgggcattttacttagtattccggaatcattccgtagtgccaatgtaatggggttttatactgataacaacggttaaagtcggtaagagtaggagtttcttatcattgattgaacagtcgcatcgacgcgggatacagcggtttgtggtttcagtaggtttattaggtataatatggtagactctagatgtttgattaatgtatgaggtaggtttttatttgttggtattgcgatgtttgttatgtagtaatgattaccaatggtttgtaatgaaagtatttgtttgttcattgtgttttaaaatcgtaaagtagtatatatatatatatatatatatatatattattacattttatttgatacttataatttcataaatgacttagaaattagatgtattaaataatgatgatataaatattaatacattatcctgtacataatacttcccaaataggaaataaaggaatctctctttaaaattctccaaattttcatgtaagcgaatctaagcactaaagccatcattaaatcgatatatccatcatgatctgggtaaagataccgtcaaagtaattgtcaacccactaaacaattatgacagttcatgatcctgtattaaattatctaaatacacaatcaatcaccggtgaatatctaacttcaaatataaatgatataccattccttcattatactataactaaatatacccaatcaactaatgttttaaataaatatagtgaaaaattaacgaataataatgaaattaatgaaattgatgaaaatgatgaaatttatatacctaaatataatggtaaattaacaaatgaaatgaaaattagattttatataatgcaatttagattagaattaataatgaatgaatttaccttagcaaatggtacaatttcaagaattaaagatttatttagttcattaaaaattgatgaagaaattggtccattatcacaagttattttattaagaagtgaattattagaaattgaagcttgttataatttatcaataatcgagaaaaataaagataaagaaaaagaaagtaaagaacttaatattattgataaaattgctgatattaaaaatactgttaattcatatattgataaatcatgtaaaattattttaaattcatttaatagatcaattgctttaagtatttcaaattcaggtaataaatcaatgagagattcaattgatttatatcaaattcagaaaaggaaatgtgaaattgatattgatttagttaatttagcttgttcaattgaattaaatttaaaagatgaaaataaagtttcattaaattcaaatttagcaattaatgaatcaattaatgcattaaatgatttattacttttaagacctttagatattgaaatttatcttaaattaacttatatttatcttaataaaggtttatttaaaatttcattattttatatttctgaatgtttacttaatggtggttcaaatgcttataatatttggtcattaagaggtgaaatttgttatttacaaagtaatgaaaaattaaataattcaattaatgatttgaaatattggttattaatttcaatttcttcatttatttattcaattgaattaaatgaaaattatttaagatcatggtgtggtttacatatttgtttgaataaattattcaaattaaaggaaaaaaataaaaattttaaaattgatgaaatttattataatattgaaaatataaagaatgaaaaatttaaaaattttatacaatttaaaaataatttatcaattaatgatagagaaaatcttaattggattataaataaatatccaattaataataatattgataaatctacataattacacaacatccatcattactattattaccagtaatttgtccattattttgtgtgttattaccactaactaaattcattgatttattattatttgatgatgaaccttgtttaaattgatttttccttttattaccccaaatttcaggtattaaaggatcttcagtttgttcagtataattaattaccattaatgcacaatttgatgctttaactcttggtatctttaattcttccattaatttaccattatatttatttattctatctaatgtcatttgcttcttacgatttaatctaaatgcatgtactaatttttcacgtagcacaacagtttgtgtttcattaacattattaatattatttctctgttgagcttgatgactttgttgatttaatttttgtgattgctgttgtaattgttgctgtgattgttgattaattttctgacttttattaagttcaacaggtgaacttgatgaacttacgttaagtggttctgtatatgacatatatgttgaatttgttgcacttgttggtgttaatgtatcttgtgtatattctcgtgtatattcttctgatgttggatagtgactgatctccattttaactttgaatttttagcttgtaagtttatagatgaatgtatttagatttattttgtgtgtatatttgttataaatcagcttgttaggataaacagatatattacatacaatatttacaaaattaacaatttaatttaagtttacttacttcattcatatacacaatagtgaggactatcgtcattactttatatgaaagtggcataaaaatctcgtaataggaaaaagagcaacaaagcactgcgatatgaaacatgtcgatgtgtttcatgttgtcctctgagggcagaatcgcggagttggtaaagcacttgctaccctttttgctccgaatctttatttactaatccccgttatacatgtgatttcttgcagtataatattggtattggtagagtaatgagtctggagaacttggagtcctacatgtagtttacatagtaatcttgaaagtggtgtatcgaaaagtaatgataatagtaattcattagataatgataacaataacaaaaacaatagaggaatagtgtatcagttcaatgatactacagtgtcaataaaatatgttaaaaaggctccattgtatatcttaagcaaaccttcaacataccagagaaatccactaatcaaagatcattgtatgaactatgaattgattaaaaacttacgtaaagaacaactagcttttcatgaatctgtaaataatataaatgggattgttgatcaactcgatgaatcattcaaattgcatataaagtcccaattggaacaaaatcatataattgaatcagaaggagaaggagatcctcagtttatgaaactaccacctacagattcacaagtaaaagaactagatgaaaaaattgatgaattggaaatttcagataatactattgatttgatagaattttgtgaaacttcacttgtaaatttcaaagataatccaaattattggaaaactcaatttttagaataatatgtattgtatgttatgtatctagttatatgtattatacaagtgtaagttagttaaagatttttgaaccaatcatcagttgtaggatactcattactaccattgccattaaaattttgaaatccagttcctaagaaatcaaacattggagttataccttcaaatgaggaattattattcatattcattatgtcagtatcaatctgactaaataaatcatttagtaattcttgttgttgttgttcaaatacaactccattactgttaggggtatctgtaattccatttgatgataataaatttgtattaatgcctgcattaattggtgactgacttttttgtttagaattaatatatccttcatcatatcttacttgtgaaattgagctatttctagaactatcaaaaaaatttttagtattaaattcatcaatagttgaaggtatttttttactattatcaaatccaagagtatcatttattaatacactagatttacgactagatttaagtatattttgtgtaacatcatcaatttcagaaaacccaataggtgaaggaatgaaaattgaattaacactgttattaggatcattattttcagaattaacagaaatatcacttcttttcattggtgtataacttttagttgcaaataaatgaccacccttcataccatctgcattataatttacaaaagttttaaagttgatcttcgattcatttgacatattcatattatcaccactatcatttttattattttttagattaatcttaattttttcaattgctttttccctacctaattcatttaataaatcaaccattgaattagttgcaccatttttattaaatttatttgaaactttcatccacttagaaattctagttaatatcatacccattttacttgcaactttagaatttttagatagtttttcaatagattttactactttttcatgttcttcctcaacattaacttctaaatcaagttcttgggttttaattagtagtctagccctaattaatgcaactaatgcatgcattggtctataataaaaaaatgttgggaactcactcgtttgttcatccaatgcacaaaatgatgatataactttttcacttgccttgataagtctacttaatgtctcaatataaacttctgttaaaacatcacgacgtaataaaactttacaaacaatataatcatacattgtcattaataattgataatatataatggataataaatttctcatacttgatgatgaattaaacagattggaatccattgcaatcttttgcatccgtttctcatacccaaccattatgtcctttaattttgagttattaactgggaaatctttttcatcactattatcattattattattagatgatctacgaactgattgatttgggaacccatttggacataaaaattggaaaatttcttcacctaatgcaacaagttttgaataataatataaaaatttatcagcttgatttgattcaccggataataataattgacaacatctttcatgaacgggtgtccaacttacaactttaaatctaggtaatgataatcctagcgatccacaacatgcataaactgccatataagatctaatcatttgtctttccattgaatcatcacttaatatatttgaagaatttttgtaaacttcattacctaaatccaaacataaagttaaattcaatgccattaataaactcatttgatgtttatatgacccccattttttaggtggagaacaccataatgataaaactaaatgaatttgaataaaactaactgatatattaccaataattgacgttcgtactgataaattatcttctaaataataaagtaaggtatcatgtaaatctggatcatttaaacaagttaccgttatgaatgacaataaaaccaatggttcattatcaagtaaccatttataagtataatgtttaggaaatgagacacatggccagtatatatgcaattctgtaaaaaatctatccatcctctctttggcttctgaactcgttataatattcaatttaattaattctttcattatatttgattcacaagaaatccacggtaaattcggtatagatttaacagttccatctttcattgagttgattgaattagcttctttttcaatatgtttattggatgcatcatcatccccacttccacttccattttctttacctttctcttttaatgtattgatcgtatgcaataacaatcgttgcgtttcaccaagttgaaattgtaatgtttgtaaatcttcaatattggtatcatttgaaataatttcacctctttgaattccattaaatagtttatttgaatcatttatagatttttgtaattgagctaatgcactattaccctttaattttgttcttttacgaggtcttggttttgcatcagctaaagttggatcatcagtaactgaacatctcaaacccgccttaaaacatcttgtacaactttggaaacttgggtcttcaaaagtacatttcatcttaagtcgatggcatcttgcacatgctcttaatcttctgaaatttttagcaaaatcagtttgtgaatcattgtaatttgttacctgcgatcggtttaacgtggattccatctatgaaatggagtataatggggtaaaatttctttatcaaaatgtttaatctgaaaaggataaaatgtaattctttcaattgcagttaagatctagtcaaaagatcctaatgatgagttaagttaaaggtttataaaaaggttatcaaagaaagaattgttgttatgatgagctaaacgaaattattttttttctctcggacatccccggtattaccataattcttatcaaaagattacaatttaaacattatttacaaactatatctcaacatatcccataccttgaatgacaccaggtcttaagttggtcaatgctacaccagcatttgtaaatttcatcaattcaagataattctcatctctgtgatacgatttaccatcaataaaaacaacatcatcataatcagaccaatgacattgaacattaacacctaaattagatatcaattcaacatcactatcatataagaacggtaaccactcaagtttcacagtaaaggtattcaaaccgtttgtagaattagtattttgccaattaagtttatgtaattcaactaaattaatacctttcatttgtttgtaaatccagttacctttatcatcacgactcattccatttggtacacttgtcgtaatttcatcaattggattaccctctttgtaaatcgttaccattttaacaggtgcagtaaatttaggattagatgcattgaaagttaaataacattgacgtgatccgaaaacatcaatttgaatagtactctctaatggagtaaatttatccaatgatccaatggaagtaatatctatactttcaacatttgtattggataggatggatatatttagataatttgtgaaatcattatcttccatagttcctggtattaaataaggtctagtaccattatatgaacaagtttcagtttcacttgtattaaatttcaaacatttaatatcatcatttaaaattgttggaacatcattcaatatttgttgaatgtaaccttgtctaccaaatatatttgataaactagtatttgtattaatatcaaatgtttcaacatatcttaatttaattggattactttcactatatgaaacttcatagtatgaatttataattccataaaggaataaaccaattgttaattgaattgaaataaaatttaatttttgcataaatggtgataataatattgctaaaagcataccaattaaaccaactaattcccatattgcttcatcatataatttattttcttgaattgtttcatgtaatgcatcaagaactagtttaccatcagtgaaaataaagaaagctgaaattggaactaaaattataaattggatcaaccaatcatattgtgatgaattaattgcattatgttttaatttatgtaaccaagaatctcttgtttcatgatcaattataatttcactactattcattaatggagtctcctcatttgaagagtttccgtttgattgatgttcagagtttgattgattttgagaattatcttgtatattatggtcatgtgaatcttgttcaggatcattattattagcctcattattattattatcgttatatgttgttgaatctgaataattaggtgaactgttgataattgttattttatttctcttttcatgacatggagattttctaaatatcattttcaataatccgataattgcagctaatgatgataaaatatagaaaactgttataaaataaccagcaatatttgaaaaagatttcatatgataagtcatccaaaccattgagaaccatgagacagtattcatttctagtataattattagtttttgatcatcaacagctttaaaatgtgatgatatatttaaaatagtatatgatattaataaagtaattgaaaatattgtaattaatggattaaaataattaactgacaataataatggatttttctcatataagtaatttaatatgaataaagttgaataatatgataatgcaattgagacagggaatctacaccaaccacgagctccaataaaccaagttttccttgcacctataatcatctgtaatataatcatgataacgggtacaataaccagtaaggcaatatttaaaacaattgcccaattaatactaaaattaaagaaccatttattgaataggtcaaaatataatgaagtatttaaatcatcatcgaaactatcacttgaataagaaacttcatttaaaatatccaaaacatttgacatcatcatccataatgaacctttagaagtatatttaatactatccttaatagtatgatagaaagatcttggtaaataaaatgcaatatcaattccacgtaaaccatttaattgataaatatgataatcagtttgtgatccaataaaacctgaatcaaaaccttcttgaaatatagaattagcaaaaggtttattaacataattataccaatcaataactgatttatcagtaccacggaaaagtactggtttaccacctgcacctgtaccttctaaattaatgaaaaatttaacatcattaaaccatttatgattaatgaaagcttcagcacctaaaaggccaaattcttcattattattaaaattgaaaataagagttctcattggttgattaccagattgagcaaaatgatttaaaataccaatcattgaagcaatacccattccatcatcagttgtaccataggaagttggaacagaatcataatgagctgatatcaatatacccggtaatgtatcattactaccattaattttaactaataaattagaagattcataatagataattctattatcatcgtttttcttatcaaagacatcatgctgattaattaaaattgtatgattattaccaatatcatcatctaatgaaatatagggaattttattaattattgatgaaatagtatctctaagataatcatgtaaataatcattttgatgagatgtaaatggatgtttagaggatgaaataaactgtaaactttcccaagcatttgataaaattagtggttcaggaattggttctcttaatgcaatattagttgaaatatcttgaataatgattataataaaatacgtaaagaatacgaggaaggaaagggtagttttcctaaacctgaaaaggttctggaatgtctttacaaagtgcatgtagtggttaaatggatgtattccaaaagaaagcagtgaaaactatcaactgaagataaagcagcttaagaaggggactgtcctttaatgaaggataataataaattgagcctcccaatcgacccatcgactttcaaaatattaaaatatcaaatttcatgaattttccattattaaatcgttgccaagggtcttttatctttatctggaagtagggagttacttatagggataatggcatttgcagagttgaaaaacgatttaatactaagagctgctcgtggtgagaaagttgagagacctccatgttggttaatgcgtcaagctggtagatatttacctgaatatcataaagtaaaggatggtagagatttttttgaaacttgtagagatgcagaaattgcaagtgaaattacaattcaaccaattgatcattttgatggtttaattgatgctgcaattattttcagtgatatattagttattcctcaagctatgggtatggatgttcaaatgattgataaagttggaccaagatttgttgatccattaagaattccaaatgatcttaatagagttaattttaattgtgatgtttcaaaggaattagattgggcatttaaggcaataactttaacaagagaaaaattaaatggtagagttccattattaggattttgtggtgctccatggactttaatgtgttatatgattgaaggtggtggtacgaaaaattttcagatttgttaaagaatggattttcaaatatccaaatgaaagtaaaaaattattacaaggtataactgatgttgcaattgaatttttagcattacaagttaaagcaggtgctcaaatgttacaaatttttgaaagttggggtggtgaattaagttgtgatgattttgataaattttcattaccttatttaaatcaaattgttgaaaaagttccattaagattaaaggaattaggtattaatgaaaaaattccaatgacagttttcgcaaaaggttcttggtatgcattagataaattatgtaattcaaattatgatgttgtttcattagattggttatttaaacctgaagatgcagttaaaattaataataatagagttactttacaaggtaatttagatccttgtgttatgtatggtagtaaagaaattataactcaagaagttgaaagaatgattaaaggttttggtggtggtaaaaaaaattatattgttaattttggtcatggtactcatccatttatggatcctgaacaaattagatttttcttacaagaatgtcatagaattggtagtcaataataatttataatctaatataatttttatataatatgtacataatgaacattcctataatctcattaaacctaatttaacaactttttgtaatgatttagttttaggatcatcaaattcagtttcaataaatttattaattctttctaacatttcatttaataattttaatgcaattttagattcatttgaatttgaatttgattggaaatttctttaatttttctaattgatgctaatgcaacaacatatttaccattaataaaatcataattaaattgtccattaataaaataaacagtttcaggtttaattgattttaccatcacatctattaataagtttctctaattcatcaattttatccaattcattatttttaattaatttattaattaattcattacctaaaggatcagaatctgaaactttattataaattaacatattatccttccatttaatttcatcctttttatcctttttagatcttttatttaaatataatgaatgatctaatgctttaattaataatttattattttcctttgtaaatgaaattaatgacattaaatcagaataaatttcaccaactaatgattcatgatataaattatcttcccaatcaatcatttgtaaatatgaacgtaaagtacctttacggaaagcataaaaatggaaatcaaattgatcttcataatattctgcataaatttggaaaattgaaaaataacgttgtaatgcaagtccaagataagtttcaactttcttttgaattaaggtaatattagaatcttcattagaatcatcatcatgatccttatttaatactacttcaaattcatttaatgattttttaaataatcttgttaatgattttgaatattcagttataaaccaacgacattgaacaatatgtaaatctttaacaccctttggttcatcatcatttttagtaaataaggaagcaacatctatagcttcattaattaaatccgctctaagataatatttaacagatttactattaacaaatctatcttgtaaatctaataatcttgcatcattcataattttagaagcttcaattaaatgattttgatgttttaaaattcttgccttaaacatatataattcaattaaagttggagtaatttcaattgattgattaatataatcaattgccaaatcaaattgattaattttatcaaaatgatgtgataagaaatatttaatccaagttaaaatgaggggatttttctcattctcttcaaatgatttaacaacatttaagatgattgggattttatttgaatcattatataatgatttaatattattgaaaacagaatggaacaccacgtttaaataaatcttgtaaataatttgataaatgagatttaaattgttcatcattatgattaaggaatgttaatggtaaaaattttggtatatcaacttttggataaaatttagataatttatttaaaacaattaattttgaactagtattattttcaattttcaaagaattaaataaatcataataatattgaacattaagaggatttctctttaataataatctaattgttaattgagcatcatgaaatttttctaaaatcattaaagttttaaatttaagttctaataaaccagttatatcataacatttaaacttttcatttgaaattaataagttattgatataatttaaagtttcattataattttctaaattgaaaaataataaagctttataaattaaacattctgaattttcagttaaatcatcatcaattaatttatctttaataatattttcaatttgattttcaattttaattgaattattaaaatcattatttaaataataagcaattgaagttgaagaataattagcacgataaccagggttcagcttgtaaataatcaaatctagttttaattaaagatttataagttcttaattgagataaacaagatgataaatctcttaagataccattatttgaaggattatttgaataagcaattgtataaaaatgagttgccatttcataatttttaatttgtctataatatagagcggctaaatgagctgaaattgaatttgaaggaccatatttaacagaagttttaattaaatcattacaaattgataagatattaggaggagttgaaattaataaatttggatcttttaaatctggtgattgaggatgataaaaatgtataattaaagcttttaaagcataagattgactatgtaaagaatttttctttaaaattttatcaattaaggttaaagattttttataatttttattttcataattttgtaaagcatctctaaattgtaattcaacctctgccattgtggatgtggaggggtgtattgactataaaaggaaagagtgaatgaaattataaatataacaaaattgatatatggtccaatgtcgagattgaaatttcccactattagctaatacaagaataaaagaaagtaataataatacaagaaaccctctctataccataataagtaataataagtaataataaaatacgtacggcggttaattaatttaatttactattattaatttacgctattgttatcttattcttatctttatatattactttggtttattataaattgacttatttcctgtccttcatgtatttcttttcacttcaattgctttattctcttctcttctcttctttctcttcttcccttttcttctcttcttcttcttcttcttcttctcttttatcatcacatcctacactcgctttaaagatgttattcaatttatctgctttatctgctttagcggctattctttcatcagcttccgcttataaagctcaattcccttcttcagatgaattatttaaaccttcttatactacttctgcaattgcttcaaaatcattctgcttctactcactcttcttacatcccatctgctgttgcaactgctggtttaaatgaaacaatgtattctgattataaattatattctcctaaaatgttcattattaatatgttctcattagaagaatctccatttcttagaaacttatgatttcgttaatgaaattcaaattcctggtttatccccaatttataattcaattcattgtgatgaaaattatgaattatgtcaattaacaactggtgaaggtgaaattaatgctgcttcaactttaacctgctttatcattatccccattctttgatttatctaaaactttcttccttagttgcaggtattgcaggtattctctccattaaagggtacctattggtgatgttacttttgctaaatatgctgttcaaatcttagaatatgaattagatgcaagagatttaccttcaaattggactactggttattatgctttaggtactgatgaaccaaatgattatccaattaatatttatggtactgaagttttcgaattaaatgaaaatttaagagatcgtgctactctcattagctcaaaatgctttactttataatggttctaaaattaataatgaatttagattaacttataattatgcacctgctaatgaaactccaaaggcaattgcttgtgatactttaactggtgatacttattggtttggtaaattattagatgaaacttttgataattatactactttaattactaatggtactggtaattattgtacaactcaacaagaagataatgcaactttagaagctttaattagagctgctaatttatggtttagttgattttagtagaattgttgttatgagatcagcttcagattttacttattctgataattatttaggtaataaaactgttgaattctttgatgatgtttatcaaggtggtgtaactgcttcattagttaatttagtttatgcttcacaaccttttattaatgatgttttaactaattttgatgattatgataatggtttatatgatgctgataattatattggtgatttctttaattcattaggtgaagatattgatattagaacttggggtaatccaacttggggtactgcttaattataaagatcgtaaatctttgatcgaagatcgaagattgtagatcttatattcatatgctcatatcttcatatcttcatatgactatatgctcatatgattatatccttgtatgctcatatactcatatgcttatatgctcatatgctcatatgcttgtatgattatatgactatatgattatatgatcatatcttcatatccccatatgactatatgactatacattacaaatactttttgattccctttacaatttattttaactttcaatcgttatttctttaatattatatttactctttatactatgtaattattattattattattattattataatttatattatattttaaatgattacctaataatcatcatccctataacccaccatactctcctcttttatcaatgtcaattgatattgatattaaatcaattaaatttaaattaattaatcaattaaataatgcaaagcaaatttgtttattaactaatgaaaatttattaaattcttttaaatatttacaagaaaaggataaattatcaaataaattaatattctcaattaattcatttaatcatcaattattaattttcaaagaaattaataaatcaattttaaatcttataaatgatcatcaatcaattattaaatcatttaaggaaaatgtgaaattttcaattaatgaaagatttccaattatataatcaattgaaaatcaattgatgttaaaaaagatttaattactaataataatcataatcctcacattatatgattatattgatatttcagaatcagaattaatagttgatcaaataaatattcatttaaataaactaaatacattcatgggataataaaattattaataatattaaattaagattccaaaatcattttaattatttacaaaatgaatggaatttaattatatcattcaaggaaaattatttaattaaaaaggatattgatttacaaattgatgaattaattgataaaaatcattcattagaaaatgaaattgttattattttaaataaaatgaataatcaattagatgattgtatattatttgaagatcaattattaaacactgatacccctgaatactaaattatatgataaaattaaaaaatatccttcatcatcattatctgaattaactgatttaactaataattgtgatattattaatcaaaattgtaaagatattaataaattcttgaaaatttacaaaaattgtcaatttaaattgaaaaattgccttgaagagataaatgattttaatttaaatattttaacaaaacaagtacaaaatattctcataccttcattaactataattaataaggaaaaattgaaaattgaacaattacaaatagatttacaaattttcattgatgattcaaaaaaatttattaaatcttatcataatttaattaatgaaattaatcgtaggaaaaaattaaatgaaaaagttgaattaatgattaattcatttcaaaatgatttacttaatttacaaaatgatgatattattattagatcgaaatttttaaatgaaaataatgaattatttaccacaagatttaatatcaaattcattctttgaatctaaattccctgaaatttcagttgcttataaattggaagatttacctaaaaaaggaacgtaatattatttatacttctatttacatgttttctatacatacttattcataattatcttcaagtaatttaaatttattgaattatttcatcaactgataaattttcaattttcctattactacgtgatctaattgctaatttaccactttcaatttctttatcaccaactaatataatataattaaaacctttattaattgcatcctttgtcttaaatccatatagtttcatttctatcatcaatttcaacgaaaaatttatttgtatttaattttgttggattatcaaaatcttcaatttcattacttaactttttaacaattttatttgcaaattctttatgattattattaattggtataacaattgcttgtcttggtgactaaccaaaatggccatttaccattaaaatgatcaattaataatgccataaatctttcaactgatccgaaaattgctctatgaatcataattggtatatcataatcatctttatcattttgatatcttaattcaaatctttgaggtaattggaaatctaattgaattgttgcagcttgatgttccttaccaaaattatctgttaataaaatatcaatttttggtccataaaatgctccatcaccttctcttaatgaccaattattttcacctaattctttattaagtacattagataaatcttcctctgcacgattccaatcatttaaattaccaataaaattatcaggtctagttgaaagcatcattttaaaattatttaaaccgaaaattttataacaaattttaattaatttaattgttttagaaatttcttcactaacttgttcatgtgtacaaaaaatatgtccatcatcttgatgaaatctacgtactctagttaatccagttaatgcaccacttgattcatttctatgtaaacttgaccaatcactaaatctaattggtaattctttatatgatctattaaatcttttgaaaacaatacaatgacctggacaattcattggttttaaaccataaatatcatccttttcactttcatcaaatttacttttatcattaccttcaactttaaacatatcttcagaatattttgcccaatgaccagaagtttcccataactgtttcttataaattaatggtgttataacttcagtaaatccttgcttttcttgttgcaacttcataaattttaaaagtttattaaatatacgtgtgccatgtggtaaaaagaatacactaccaggagaatttgaatcaagcatatataactgttgttttgttgcaatctctaatgttgcagttgatgttgataatatacttttctcagatttacctccatgattatgtccatgatgagaacaaaagtttctcaataaagttctatactgagctaactttcaagctcatcctcactgtctctactcaacctacaactacaatgaatcaagtccatcatgcaaactgtaactaaccatccatgaacaaattcatgttgaacaaatacactaatctctcccgacaagcgaatgtaaaattcccccaaacttccgcaaatacgcgataaatggccacttttctcaaaatgtttttttttctatttaatttaactatttacaattacaattcatcatgttcaatatctttatcaataacagtctctttaatatctttattagatattaatttactaacttcttcatccaattcaacccattcactaatttgtcttctagctctatctaatttaggttccttagttaatggattattacataaatcaatagttttagcatcctttaatgattcatcactacaccaagtttcacaccataaccattcatttggtaatgaataaattttaattaaatcttgtaaattatttggtaaatcttgatctaaattacttaatgaattagaatcatatgaaagtgcttgataatgatgtcttaaaatatctcctgccgcaatttctctaaatttaattaaatcaataacatataatgcacttatatgatatttaaatttatcatttaataattctttccaatatccagttttccaaaatctaaatggttccatttcatctctagtttcccccattggtgtatatccatatggtgcaccttctaattcaatatccattaattcctttaaatcagttctaacaatttgatcactatcaacaaatataactttatttaaatcttgtgggaataatacatcaaggaataatattttatacccccaaatagttctttgtctctctctttgacttcttaaccaaattggccatttatacataattaattcatattcaaatccatattcttttgataaaatcggtaaatttcccttcaattctggtgacatgaaattctcaataaaccaaaatttaactgaatgtttagtatttttcataactgatgaaatcattatacctaaaaatctttcatataaatgaccctgatgcaactgtgaaaatattaatatctgcataatttgtacttggataaataaattcataaatcttagtcattaaattaatataaaaattggcaattaaactttcatttggtttattatcaattggttcaattaaattaattgattccataccccatgacttctcaaatcttggttcaataatagatccatcaagatcaatgatagttactttaatatctttttcaattgatttaaatactaatgaacctttagtataacttttaattccaaaatcccaaacacctggatttgccttgagttggaaatatccaaaatttgccataacattagtatctgatgaaatttcaccattatgaatttcaatcggtaatccaccaggcggattaaattcattttcttccctatctaaatatgatgcataaccttcaataagtatatttttcaattcaaataccccattaacaatatgtgaattagttaaatctaatttaatattatctaaatcagttgatgcttgccttaatatcaacttaaccatctttgtggttcatttaatccaacattgaactaatgttttctcaggaacattggagaaaactatgtgattattcatgttggtgaaatttacattaatattacccttgtagaatctattaattcggcatttccttcaatttctagagttggtcttaaatgaacagttcagtgaaataaactggaatattttcaaacaactggaataaatgatacaagttcttgaccttcctcagtgactggatcaataatgaaaataacagaaagtaattccattttcctccattgactaatttttcaattctattggattcaggtaatgaagataaattaattcttggtaattcagactgataaataagtatcatcaattgggaaaaagaatgaatatgatgtcttccatgcaaaatcttcaaatttatcaaattcatcattaaagttaatttcaggtttatattctttatataatttctttaatgaattaaatctaataaatctttcatatttaacaattgattctaatttactttcagttaaaaataaaccatcgaatttgaatttgtctacctgctataataatattaatatcattactatctttataatcaagtccatacatttcctttatagttctcaaagtatccttaacttcaaaatcatcttgaatactactataatccagctttttctaaaaattcgatttgttcattaatatcggaaattgctaataatttcttaaaatcagatgtagcataactatcaactataacaaatttaacacctcttgcattaattgaatactttaaaacttctttaacttgcttaatatatgcactatcaaggaaacaacctattaagttaactgtaaccaatgcttcatttctcttagcatttttaacaattttcaatgaatctaatgcttgccaatgtttgaaagctttgaaagttgctggttgaagaaattgtttcttgataattgatatttcatcaggtactaatttttcatctcttaacttaaatgaatctttccttaaatgtttacttaatgaagttttaggaacttatttgagaattttgtaaatcgtcagctaatgattttgcatctttaaaaatattttgaatagctgcatcaatttcattaaaatcaaataagataccatttgaaaaaatcgcaggtgtatctttagataatgcaaaagttttgaaaagatttggtaaatttttagtatatctatcctctaatgcagaatctagatatgggaaaatctaatgctctaaatgttaaaagtgtaacaggcttcattcagaactaacaaatctatttaacatgtataagtaattaaaagcttcttgaggaccagattcatggaaagtaccaaataatttacttacttgccttttcattccacccaccagtatttaataatggaattataccaatttgtattggaataccttgttcatgaacttgttgagtgaattgaactacatattcaagttgaattggatcaagaatattaatattgaaaatcaattgatggaatattttcctttgcttcaggtaatctaccattgagtacactattattataaatatcctttgaatctttaaagtgtgaatatctcttatctttttcgatatcattcaaatgaacgatagttttattaaattctgataaatcatatcttctggtcggatgaataaataattttatcatataagttgcaaaatctattgttcaaatctttagccatttgagttttcacacctatagtttcaaatattttcaaaaagtttaactctcttttgatagatttgattatttcaaataagtcatgtcttcaatgaaggaattggtgcaccattaatgtaaatacctgttggaatataagttttcaaagattctacactatctgaataaatttgcatgatttcatcctctggatattcaagttcacttaaatggtatgcatatttagggaattctgaaataattgaggataatgtagataatttatccagtgaattgttaataaaatgagtgaattttaaaccaagttgagataatttagataaatcaactttttgaatgtccttatagttaatttcaaaaatattatctcttgtaagttgttctggtttaatttcattttcagtattattgaagattaatctttcttgttgttcttttgtaaatcctctatcatcaattgcaatataatcagttcttttcaaattcaatgcagcaccataacctgataatttttgataatcatcggaaggattagaatcgacatatctccacactaaattcaatttaccaacacctgcaaattgatacatattgaaaaacatttttctaaaataattatctctaaaatcaccataaataatataagatttaccagtatttgaaataccaatcaatctatcaaatggtaatttaataacatcaaataacattgcattatctgtttccttcaacataaaagcagcttctgaatcacaataatattcgatacctacgggttcccttaataaaacatctctttcacattcattagtttcattaacataacttctataataatcataatgagcttgaattcttggagttgcaatataattagaaagatagagattaactaaatatttatcaacatcattagataataatgatatagcataatcatataattccgaaggggtaattggaatgtaatcttcatcttcaatcaaagaaaattccccattttcataatcagcttcaatacctaataattttcaacaccaattgatcataaagagtatcatttactaatgcgaatgattcaataatagataattcggagggtgtattcttccaatttgcctcaagagagatatctattgaattaagtggtagtttatcatgactacttgtccatctaattgctgtggcacatgtcaattgaagtgcaaacagagacagtactgtccatatgagtgcaatcatggttgtctagcagtataaacgtaaagaaccatcaacatccatgcatttcatctatagacttacacggaaccaaatggatgagccaggagagaaacatgttcggtgaaaattccgaggaaatttaaaggagcgggaggaaaagttttccactataagggcgaattttgaatatgataaagagtgttaaaatcttactgatgactaagtgtttttactagtttctgatattggtttactttctagacaatgttatcatcacttacaagaagtacatatgcaagaactgcgctctctctaaggtttgttagatatcagtctagctctcctagtgctaagcttatcaataacgaatccccagagcagcaagagttacgtttgaagaaattacaacaacaacaacaacagcaacaacttcaacaacaacaaaaggaagattctcaaaaaaagaaacttctagatcaaagtgggaataaaaataatgaacaagttgaaaatgttaaatcatcatcatcaaagaagataaagaaggttaaaactaagatgggatttagtaatgttgttaaagttccaagtactattagtttagagacaagagaaattttacttgataaattatatcaaggttttaatccattactgttacctattaaaccagtacgtaagaaggctaaatcaccaaaaattttagttaacatatatgaagatttaatgtttgatgaagatggatttgagaatgaagaagaaaatataagttcaataattggaccaaaacttgaaatatcaaaatatattttcgataaaaatccagatgttgaaaataaacttaaagaattagataacgaaaataaggataataaatcaaataacaatattggtgatatattatttacttcaaggaaatctgatggtagtaaacttggtagggttagattacaatataagaagaacagtttaaagacattaaagaacaggagtataaagagtaaatctgatgataccaataataatgatgatgatgattattaataattgaatgattatatgatataataccatactattattctaaatttcttttggaccttttctacaataatatactctactctactgctactgctactactactactaatgtcactaccaatacttgtaaatactcataacacttataataaagtctttataacactttataaactaaaaataaagccaattacgtaatcaaaattagaaaatggggcttgcacattattatgtcatgtttatttccaaagactgattcattcctgaacagcccgttccctacttgttttcttcttttattctttttctctttgtcgtcatcatctagatctctccgttttaactaattaggaactatattcaatgctggcccattttgctgcaactcttatattgacttcaattgtcaatgcttggtctccaactgattcttatgctccaggtatcgttgattgtccaagttatttagatgaggatgattataatactgataatcgttacaggtttcctacgtagggcaaatggtattagtgatcttgaagaaaaatggatgcaagaaagagataatactacaatcgaacatttaaaagaattcttaagagatactaatttagaaaatactgattcttatattgatgatattgtttcaaattcatctgctagaatccctcgtattgcattaagtttctctggtggtggttatcgtgcaatgctttgtgctgcaggtgaaatttcaggtttagataatagaactgttggtgcagattctcatggtttacctatcttagaagcctgcttcatatatctctggtttatccggtggttcatggtttgtctcttcattagtttataataattggacatcggtccaagaaattgttgatcaatctggtgatgatgatgctatttgggatttaaaacataatatattagctccacatggtattaatattgttaaagatgcttcatattgggatgatttagatgatcaaattagccaaaagagagatgcaggttttgaagtttcaatgactgatccttggggtagaggtttatcttatcaatttttcccaggtttagatgataaaggtgcaagtatgacattctcgggtttacaagattgggaaattttcaaaaatcattcaattcctttcccaattgttgtatctgatggtagaactcctggtaataaaattatcaacggaaattcaactgtttttgaatttaatcctttcgaattaggttcttatgatggttatgttgatacctttgttgatctaaaatatgttggtactccaatggatgaaggtaaaccttcaggtaatggttcatgttgggcaggtcttgataatacaggttttgttttcggtacttcatcaactttatttaaccaatttttattacaattgaatacaaccgacttaagtggtttagcttacactgctgctaatcatcttttacaagatttaagtaaagatgaaaatgatattgctccatggcatccaaatcctttctttaattctccttggggttcatctgaacatatcatatcaaatgatacattatttttagtcgatggtggtgaagattcacaaaatgtcccattatatccattactgcaggaatcaagaggtgttgatgttatctttgcatttgataattcagctgatactgatgaaaattggccaaatggtgcttcattagttagtacctatgaaagacaatttaattcacattctgcaaatgtttcattcccttatgttccaactattgataccttcttacataataatttaactgcaaagccaacattttttggttgttatgcatctaatttaacttcattaatggaagaaacaaatacaacttatgttcctccattagtcatatacattgcaaatagaccttggagtttcaattcaaatacttcgactttcaaattatcttatgatgatgatgaaaaattaagtatgattaaaaatggttttgaaatttcaacttttaataatttaacaattgatgataatttctcaacttgtattggttgtgcaattttacaaagatcaaaggaaagaatgggtgaaccattaggtgatgaatgtaaatcttgttttgatgaatactgttgggatggtagtacctatacttatccagaaaatgcctctcaaccaaacgattttaccacaactggtagatacaataatacacaatcacaagcttcagcagatgaagaagttaatccagattcatcatccactgcctctgcatctgcctcatcaactgcaggaaattcaatctcttcaatctcttcaaaatcacataatgatgctaatatcaatggtgtttcacctttgtttaccgtattagcattagcgcttagtgttcttgcattgaattgatgagtttcttgaacttatattactattatttattaccattattattataccttatttacagtctttttaattgaaaagaaatgattttaatccaaatttttatttttatttatttatatattatatttattattgtctaaacatatttcactgaacattgaatgcatacttaatgtaagtcaagatagagagatcaaaccaagaactgctaagccgccaacaaaatagtttaatcgcgtggctggtgtttacttaaacgattttcatgaatttaacatttgatccatggacatcgacataaacgaattcatttagattttaagtttacaaatcattaattgtttgctttttttatcaataaaataatggcagaatttgcaacatcacagataagaaactcaaataaacgtagaacccatgaaatagggaacaatgatcatagatctcatgaattagtggttgttgtgatgaaagctcaaggtttgagaaatgttcttaaaatggataaacaatcaccatttataactatcagaattcaagatcaagaagaaacgacacatgtagtatctagaggaggccaaacaccatattttgatgacgagctgtggtttaatttaaatggtgtagaggatagaactttacatattaatgtatatcatcaaaagaaaaatgatgcaaaactgatctgttgtggtgaagttgacttcacaccagcttttaaaagaagtataaaaaatggttatgatggatggtatgatttatattgggaaggtagagaagctggtagagtttatttagaaatcacatattatccaaagaaaggtgatgtcccaattggaactgaaaatgttggaagaatgcaaatgtctgaaaaaacaattttacctacaaatagtaaaaatggtgggtttagaaatacaccaaaggaaatatcaagtattagaagacaacaagatgaagaattgcctgaattaggtagtttaaatgtgcgtgaatcttctaaatcaccaagtcgattagctaaatttgagaaaggatttcgaaattctagaagtttaagtaattcaccaactaagcatgataatagtttactagattctgatgatccaagtactccacctcctagttcaggtggcgggaattggttatcatttttggacaatacgattaaattaccatcaattttaaataatatcaattttagtcctaataataataatggatcaaatcataataataagaatggatcaccagatataaatgatgaattgactgctagagtaacgcaaaagatcgaaagtccagaattagtgaaacaacgacctactaaattgtttaatagtgatgatgaatatgatgatgatgacagtaatgatataattagtgtgacggataaatggaagaaaagtattgcttcaagacaggaacctatatataaagaaagtgaccgtatagtttcatcgataacttttgatgattctactcgtaatttcactgatgatgatgatgaaagtgaagaagaatacacactaggtcaagctgttgacttaaataagtctgtgagatctaatagaaatactgcatattcaagatcaccttcaagagttccacaaattagacttgatgaagatgaaatgagacagagttacagcggaaggaagttacctccgttacataatagaaatgatagttttagtgatagcaatagtggtagtgatacggacgataatatgccacctccaccaccgaagcatattatttcaatgggatcattatttgagagtgtttcaagtgattctgtaaataattttaaattatcttctaataaccatttacctaaagcaggtgaaactctactggatgattctccaagtagacaaatgagttggtatgagaaacgtaaacatgaaagaagaaagaggaattaaaccgataaattagggtacattttatttaatgtacaactgtatgtataaaaataattttattagatatatggtaaaagcttttaatagatattataatcttatggtaaatttagaatgctgcttcatcatcaccatcgtcaccttcatcaaagtcgtcaccatcatcgaaatatttttcagcattataatcgtcatcatcttcatcctcaaattcatcatcaaaattttcttcttcttctctattatcgacatcatctatatcatcatcatttgcattagatacaacttcattaagtttttccataatttccttttgtctttcttcagcacttttaataagtttatccatatcagtaccattctttgaacttttcttatattttgtaacactaaatgattttttaccagattttgaattcataacagaatataattcatcggggaaatattgtaaatgaaatgggaagtcagttattgatttaccaattttaatttgttttctatatttatcagaatatctctttaaaccatcattaacaccaccttctaaatatacaatatttgattttttaccaccattatttgaattatcagttactaaacttttcaaattacctgtataaaatgatgaatctttcataattgttgttaaattaataaattgttggtaacaatcagtttcaatattagttggtgcaccattaattggaattgggaattcaaatgattgtgttgaaacttgttgaatatctgcccaatccagtccaaatggaagaagctgtcgttgaccacctgcaccacctctaaaactcatttttgatctgttactgttggtttatataacctattataccaattataacttcaaaaaaaagttagcaaaatttatagtaagatcaatctagctttggaaaaaaaattatttttcatgttgtatagattcatagggggatgtgcaggggtagttttagtggggagaattatttctgcccagtgtaatttcccagtgtaatttccaagtgattcgtaacctgtgggttacatgtgtgtataatatagacagtgtgtgtaattacagtcagtagtgatatcaatatcttaatgttacaatgattatatgcttatatagtaattattaatgtttgttatggagattttatatagtatagtaataaaaggattaatgtaaacctaacaggattactaatcttgtaagaattgattgatttcatcatcactgttgtaacctttatccaacttttcttgagctgcaattgccgctttctctatttcagcttcaaataaagcttgttgtttcttaacattacgtctagttgctttaccccaaccccaacttttttcacttttatgaataccttcatgttcaacaaataattcctctgcttctgcttttgcagcttcaccagttggatcattgatgagtttatcagcctttaattgtttatcatgttcaatttgagctttcagttgtctttgtttaaggaaatcagaaactcttgttcttaagaaaatataaccaccaataatgataacaagacgaattagttgataaacatcaaagttttcaaaaactcttctttgaattttatttacaactgtttctaaaatactcatttttgataacaggaagatgataacagtgaaagaagatacgaataaatcaaatcagaataataaaaaaaggcctgtaaacgttatggtaatgtgaagtttggaaagtcggaaattctccactttaagtgcgtggctcgttacgttattaataataatatagaaggaatggtttacgttgagcaggcataatttagatagggaaaaacagtataatatataatggtaacacatacaaaagatgacggcaagatgcagagtaaatcaaaaataagtaggaaatcattgaaaatacccaaaaagaataatccacctgaaggatttgataaaatacaacctacattgaaaaaatttcaagagaaattaaaggaaatacaggatgaagaatataatccatcaaagcctaaacatgaactaaaatggggcatacatcgtataaatcatcaacgtagtcgatatgtttattcattattttatcaaaggaaattaatttcaaaggaattatacctttggttattaaaatataaatttgttgatggtgaacttatatctaaatggaggaagagaggttatgaaaatctatgttgtttagaatgtattggacaaactgtatgtgtttgtcgtgttcctaaaagtgataggaaatcagaccctgattttaaatgtgttagttgtggttgtagaggttgttcaagtactgattaatagaaaaaaaacttattatactagattatattttataaaatatttacacataaaatcaaaggaactatataataaattccatatctgatcttttttcattaacaattgcataaccatccattggttcaaaagttgaaatcattctacccattacaacaattttatctaatttttcaatttcttccttttctgtaaatgaaatataatcaggtgttgtaactgtgacattttctaaaacaacattcataagttgatcaaaccctgttaatgtaccagtaactgatctacctgcacccattcctaatgttatttctttatttaataaaggttcaagatcaattattggaccacgttttggtgcaaatgtatttttcttttgttgacgttgattacgattattattcttttctgttgatgcatcttcatttttcacagtatcattaacgggttgttcatcagacatgtttacttattgaatgaacaataatatattattcccatgataccatcaaaatcaacattggaaatcctcatgttataaaattatcatcaaatttcttacgtaatactattttaacttaatatcagtaaccttattatactttcgtacttataatatacaatctataaactatataaaacgcagagcttccatttcttcaatctcctctgcttggttggtgttggattcatcatttaaagcaggagcattcatatttaaaattgattgtttccatgcttgcatctcttctgtaactgtattaatcatacctgtcggaccatcataatatacactattagtttcattcaaccatttaccatcatctgattccctttcggatgtatcatcatcatcatcattatcattattattattattatcctctttctcttctcctccttcttcttcgttatttttctcgtataatttatttaaattattactctttttggaatgatttgaagattcttttgtaaattctttatgcattactttttgaaattcttcatttaaattatcaacttcatcctcttctaaatcaataaattcatcatttttatcctttaatttccataaattaatatcatcacctttaaaagattttaatgaaaaatgttcttcaaccaaatgatcaattacttgccaaccataagcatttgcaaatcttcttctaactatcatattattatgagcatcaggttgtaaataaactaaaactttcctccaactcataccttcatgccatctacgtgcaattttttcctcaaaaaatctatgtcttttattttgttccagttgagaaattataatatttttagataaatttgtatgattacttggaatcatgtcaggtgtataaattttatcatgtaaaataacattatatctacttttaggatcattaatatatttagttgatggtgatggtggtaataaaattttctttaatgatgtaataacagaagattttggtattgatgtcattgtttgtttaattttatcaactgacatctttgattgattatcataattattattgttttcagtatcgttattttgttcatcttcttcatctattgaatcatcaactgtttgaaaataattatatttatgagttgtctttggagcctgtaagttaggcaagcagtaaccaacagttgcaaatatttttctctttaaattatcaacaatatttaagtcagttttattattactattattattattattattccttagagattcattttcaagatcatctggtatttcacgagtttctgaattttcagttgaagaatttgaattttgtttattattattatttggatatttataatcataattttgatgatcttcattagcttcttgtttagtttcaggtggattatcaccatgaatatctaaagtttcataaattttagttaaagctttccaatctaaatataataaagcacttgttcttaaaggtacaataccatcatttaaaacattagcataaactgttcttcttttaaattttttcaaaatttttctagttggttcagatggtaataataataataatggttgattaccatctaaatttaaatcttgaccagttttaccaacaataccaaattttaagaaagctttaacataagcaggattttcatttgatatacctaataaaggtgatgctaatgtaataaaattttctggatgaatttgtttaaaaaattctggataattataattaatataagaaattgcaaaagtttgaactggaccacctaatgaatgaccaataaatgaaattttattaacattattatttaaaccatttaaggaatcatttataatgaattctgctaatcttctacctaaatatttaatacctctttcagttttacaaacattatcaaaataagctctaattactatattttcaccagttattgaagccattgattcaatttgttctttcaagtaaaacatatcagctgaaggaatttgaatgtaatccatgatttaatagaactagatgaataggttcatcaattgatttaggaggtttattccaaatatctaaagttgttaaatgttgaattgataaattatttggtttaaaatttgaatttttcaaatttgaataatttttatttaaagaggattcattatttgataataagatttcaaatttaatttcaggcatttgtactgaaaacaatttgagatataatatcaacaatccaaatatatttatcatttaatttatttaaagttaatttatgaattaatgaattacctggtattatatttggttcatagaaaggttgatcatcagttataaaacaaggatttttatgagaataatctgaatttcttatatcacaataaatcatataaggaccatgtaaatgagcagaattcatgagaacattttcaatatttttaactttaatgaaaagatttgaaccaatttcattaattatattatcaggggtataagtaattataaaacgatgaacatcacctatttgaagagtacctgaattcttataatagatattatcagacattattataataattatcgcattgaataattgaattgaattgaattgaaataaattaaataaaataaattgtataaaagtatcctcctttccttcctttggtatctagatttcatgataataataataataataataatgattacgtaatcaaaataataatatagattacgtaatgtcttaatagacgcgtctataatataaaataaccattacgtaatcacctccggtgtattacccaattaggaaacccgcacacaaaaaataaaaataaaaaggaattaaaacaccggtgtcggggatgaaaaaaaattatttgcaaggcgcaacgggtgggtgactcaagtgaaaatttattattacttattactattactatctctgactctattttattttatatctccatgaatttttcactatatttgaatttcatcacatataattttcatctttagattttatcttaaatttcacttgtttcgtttctttttgtttctgtatcttttattggttattcacttatttaatttctttctatctttcctattaaatagacaaattttcatatattagcctcctaaaaaatgctttctagaaatttattcaaatcagcaactgctgctcgtatacctgctgcatctgctgcaatagctagaaattcagtttataataataataatattaaatcatcatctctcaactcatcattatctttaatcgtcatcgttcttcaacttcttcaattgttagagaaaatccttctcctgcttttaatcaagatttcgatgattcaaaatcttcttcatcttcttcattcatcaactattaaaatggattcttcattaattggtaaaactggtggtgaaattttccatgaaatgatgatacgtcataatgttgatacagttttcggttatccaggtggtgcaattttacctgtttatgatgcaatttataattctgataaatttaaattcgttttacctcgtcatgaacaaggtgctggtcatatggctgaaggttatgctagagcaagtggtaaacctggtgttgttttagttacttctggtcctggtgcaactaatgttataactcctatggctgatgctttagctgatggtatacctttagttgttttcactggtcaagttccaacaagtgcaattggtactgattctttccaagaagctgatgttgtaggtatttcaagatcttgttcaaaatggaatgttatggttaaaaatgttgcagaattaccaagaagaattaatgaagcttttgaaattgcaacttctggtagaccaggtcctgttttagttgatttaccaaaagatgttacagctgcagttcttaatcatgaaattccaattcatttaacaattccaaaaactacaattccaaaattaagtcaaaaagaattaactcaatatacaattcaatgtattgaacgttcagttgatttattgaaaaaggctaaaagaccaattatttatgcaggtgctggtatcttaaattcagatgatggtccaaaaagattaaaagaattagctgataaagcttgtatacctgttacaactactttacaaggtttaggtacttttgatcaaaatgatgaaaaatctttagatatgttaggtatgcatggttcaggtgttgctaatttagcaattcaacatgctgatttaattattgctcttggtgctagatttgatgatagagttactggtactatatcaaaatttgctcctgctgcaagattagcagatcaagaaaatagaggtggtattattcattttgaaatatctgctaaaaatattaataaagttgttcaagcaactgaagcaattgaaggtgatgttactgaaaatttagaaattttcaatgatttaattgaaaaagttgattcacgtcctgaatggtttaaattaattaatgaatggaaagaaaaatatccttatgcttatcaattagaaactcctggttcattaattaaacctcagactttaatgaaagaaatttcaaaacaagctcatgcaactggtaaaccagttattgttacaactggtgttggtcaacatcaaatgtgggcagctcaacattttacttggacaaaaccaagaacttttattacatctggtggtttaggtactatgggttatggtttacctgctgcaattggtgctcaagttgcaaaacctgatgctttagttattgatattgatggtgatgcatcatttaatatgacattaactgaattatcatcagcagttcaatgtaatgcacctgttaaagtttgtgttttaaataatgaagaacaaggtatggttactcaatggcaatcattattttatgatcatagatattctcatactcatcaatcaaatccagattttatgaaattagctgattcaatgcatattaaaggtattcgtataactaaacaagaagaaatggttgaaggtattaaagaatggttaaattctgaaggtccagtacttttagaagtaatggttgaaaagaaagttcctgttttaccaatggttccaggtggtaaaggtttagatgaattcatttattttgatgctaattttgaaaaagaacaagctgaattaagacataagagaactaatggtaaacattaaatttaataaattttgtacatataggtttactatttaattttctcatttatgactttactatcttttacattccatcatttattatattacttattcttattctattcatcttatatttctaatagaaattgcattaaatttgcttttcaatatgtttatatttttttttacattttacattttacagtttacatctttttacaaaaaattggattttttttaatggttattttttaccttccggacaggtactaacaaaatttactctctattcattacaaattatattttacaaaacacttttctcaaatattttatactctatatcactttaactgatcatcgaacgatcattaaaattttaaaattagtattattattattattattaacaatactaacctcttttgaaaaactttttcaaattttcattaaatgttgtcttattctccgtaaatgttttacttaaattcttctcaatattatccttagctctgtaaaattgaattagttgcagttttaggactattgaaaaatccaaaattaggtaccggtgatgttgatggtgatgtatttgatgtgtctaatggtgcacttggtaattcaggtggcgttaatgttaaattagaattattatcattattcgatatacctgtaattgtacttggtaaataaattgatctggaattagtttttgcatgtccttgagatcttttaacatttgttgaagttgtattaacaacatttaatttttctaaaaattcattactttcattaagttgtgaatcaatattacattcctcatatgatccaagttgaagtttaaacatatccatatatttaaatttatccttttctgtaacttcagatttcataatacctttaagttgtaaaactttcataaaatttgaaaaattcatatcaccaataattgaaaaataattattaataaatgtatccattggttttgttgataccataagaattttcaataaattatcaatattattaaatttaatatttatactacttttaaaacttgttgaacttaatatttttgatccaccctctaccattgttggtaaaatatttataaatgatttaatttcttgtatatcaagtttaaattgttctgccataactattgttattggttctaatttaacaatatttaatagaatatttttcaataacatatcaactattttatcaataagatttctgatgtaaattactttactgacttttttaaatataaattgacaatcttctcttataattgattttaaactatcaacatatcttgattctcctgtaacttcatctagtattagccagttaaaatttgataattctctccaagataattgaacatcattttcaattttatagaaaagtaaattaatacaataaacaactaattgtaaaaaaccatttgttgaagtttcaaattctacttgtgaagataatgattcaggttctatcaatgatttgattttttcctccaattgttcaattgttgatgaacaatatgatgcagtattcaatactaaacaaattaaatcaatgccttcctcttgacttttaatatcaactgaaattaatgatttgctatcaggtaatattgagtctaggattttatgctgatattgacctaagtatttattaaatattttagataatcttattaatgatttaccgttggttaactttgataattgtcctaaaatttgtctataaactctgaacaactcacctgcactttctaaaatattaattgaatcttcaccattattattatttttatcatctttatcaacatcaactccttcacctgttttcttaaacattttatcaggatgtgaaaattcttgaattgccttttcaattatttttgattgactatctacccatatacttaaataaggttcaaaaactgatgaaattgatttggagaaatcaatgtttttcttatttgataattgatcatcaaaatcttgataatatttgaatttctttaataaataagcttcaaaatctaatgtatgagctaaagaatttaataaaacattaacatcagttcctttctttgtcgttgattctttctgtaaaacattattcaaatcatttctggtatatgaacaaaattgttcagttaatttataagacatattccaagattttgggaatattttcaagtgttttgattcaaaattagataatacattttgaaaatagatataccttctattaagattatccaaagagcccgcttcttctgtactagtaaatatttgatttatatcctttaaagtttgctttatataccaagattccaattgatttttatgttgatcacctaacatttcaagtatatgacaagcttcaattaatttagggttgattaattcttcattaaattctgaatcaaaatcattgaaaatatcttgagttaatctatttttcattgaagatattaatctattcaatttattaacttcatcaatacttttaaaatcttgaaaatattcatttagttctaaaactgcacctaataattgtttaatttcactataatttttaatttgtctctcaatttctagttgtttatctaatctatcataggcagttactaacatttgtaaacgttttaaagttgtcattgtaaaagttaaattttttttacattgatctaattttttaatacttgcagtcattgaatttattgtattacctgtataacctgctaaagtcttcaaattttggaaactctctaataaatccaatacttgattatcaagattttcagtttgatctttatcagatttcaacatttccttatatttttcacgtttatctaaaatttcaacttctaaatttttttgatataattcagaaaatttattaagattatcaatatcattcaatgcagatggatcattaaataattcaaagatatcatgtattggatcataatttactgaatttatatcatttgaatgttgtttagaaccatctatagttccatttttgtgtctatttcttgaagaatctattaattccgactttagtgacttcatatccctcaaaatctaaatatatcacctatacaattgagcagatatcccgtgatctctccagtatattattattccaccagccttttcttctacgagatggtctggtataataaacatgtagtaagcagtggctatatggaaaaccaccttcaacttcgcgccttgaaaaattaaaattttggaaatttgcaaatttcaaaaaaacttcacttttcgtccaatttggacatctacaatactgtacgttacttcttatttctttattttgacaacaagaaccttaataacaagagaatatgtctttaaaattacctggaaatcctaatagtggtctgttcaaacaaggatatcaagtccattcaaatactgatggtgcaattaatagaaatattcaagcatgtcgtgaaatttctaaaatgatttctacatcaattggaccttgtggtaaaaataagattattgttaataatttaagtaaaatctttattacaaatgatgctgccactatcttaagagaattagatgttgttcatccagctgttaaagttttagtaatgaattcagaacaacaagaagaagaaatgggtgataatactaattatgtcttagttttaggtggtgaattattaaatcttgcagaaaaattagtagttttaggtttaacaccaactgaaattattcaaggttataaaatggcaaataaatttgcaattaaagaattggaaaatttagttattgataaattaaataattttgatgataaatctgaattaatgaaaattattaaacctgtcattatgtcaaaacaatatggtcaagaagatataattttcgaattagtagttacagctgtacaacatgttatgccaaagggtaatcctcaatcttttaacgttgattctgttagagttgttaaaattatgggtggtgcattaccaaattcttttgttattaaaggtatggtattcccaagagaacctgaatctcaattaaagagaattaatcaaactgctaaagttgcaattttcaattgtcctgtcgatatatccgcatctgaaactaagggtactgttttattacataatgctgatgaaatgatgaattttagtaaaggtgaagaagatgaattacataaagttattaaagaaattcatgattctggtgttaaagttattgttgcaggtcaaggtattggtgaattagctttacattttatgaataaatataatttacttgtcttaaaagttccatctaaatttgatttaagacgtatatgtcgtatatgtggtgcaactcctttagttagattaggagctccaatgccagaagaaatgggtgtaattgatgttgtagaatgtactgaaattggttcagatcgtgtcacagttttcaaacaaaataaagaaacttcattaacttcaacaattgttattagaggtgcaactcaaaataatatggatgatatagaacgtgcaattgatgatggtgttgcatcaattaaatctgttttgagagatccaagattattacctggtgcaggttctgttgaatcagaattagttaaaagaattactaattatggtgaaaaaactcctggtttattacaattaggtattaaaaaatttgctgaagcatttgaatttttaccaagattattatgtgaaacttcaggtttagatccaagtgaaatattaccaagattatatgcatctcatgatgataatgattcatcaactttaaaatatggtatcgatatcgaaagtgataatattgatgattgtcttttagatgttacattcagaaaatatatttgattcattaatcagtaaacaaaatgcaataaatcttgcaactgaagctgtttgtactatcttaagtgtggatcaaatcattgttgcaaagaaagcaggtggtccagctatgccaaagcaaccaaaaccaggaaattgggatcaagcagattaatttaatcattttagttaatcaacaaaatataaaaaagtaaaatattttttttatttttaatgtatagtgggtatataagtacataaatacaaaatcataagaaaaaaagttgaataagtaatagtcgtggaagcatctatattgtgaattatcatcaatcaaataaagataataaaaatgttgataaaagcaatataaagtaaaatgtactttccagttgaatgttttgatgctgtattatccttatagtcgtcatcagtcaatgaaactgaaactatatcaggtgtccttgtaatcatccatatggaaatttgttacattggtaataagtttactaatgccaccaagttcatcaacaaaattgtatattaaagaacgtgtagaattagttaaaaatgtatcaccttgggcatcccaccacattcctccacctaatccattatcaataacatatcttgccttttgtttagaaataacgggtgtatcataaaaaataatacctttatcatcagtatcatttttgtatgcatatgctgcaccaagatcaatatcagaatattcagtataacctgaaggtggtaaatcggaataactaataatacattctttatattggtcatcgtcaaatttattcattgatactgattcaatgtttgcacaaccactgaagggtgagtaaagacgatcagtattgaatgatctaccatataatggcattcctaaaagaatctttgatttattgactaattcctttaatgatttcattgcattatcaactgaaattggactagcttttagcttaggatcagtgtataaatttgattgtaaacttgtgagtgtactccatgtacctgacatatcataacccattaaattataatagctgacaaatttttcaagggcagcaaaatcataatatttgtagacttcagtatcaactggaatagccaatgtgataatctttctctcttctggatattcagctaatttgttgaatcttttgtacaaatgcttaactaaataagttaacatttgtctatcatgttgatttgatgggaattcccaatcaatatcaacaccatcaaaacctaatctgtggatattttctgcaacattagcagcaaacgctttcacaactttcttactggtagcaacagctctgaatttatgaaatgatttactaccaccaattgataaagatatttttaatcttggatttaattgtcttaataatttaagttgaccaaccgtacctttaacttttaagttgtgtgaattttcattactttgcttgattaaaatatcagattcttcaagataatcactaatccatggtaatctgttatattcaccggcgttaacattatctgaaatattcaagtactttaaatcagtagtatcatctaccaatgttgaaatatttactgaatttccttttcaacttcccattcctcatctacccatttaatatttgtgttggcagtatcgatatctgcaaatgcataaaaaatatgtgtaacatgagacaaggggatttggaatggatctgtgtttggaaatgaccattgggaaaaataaactgcgttaacatattcattaggtgaatttatatcaagagtggtagcagctgttcctaaggaacaaagtgaaaaaaattctagtaattgggaataagttatcttcattgctaaaaaacgaatactttataggagcaatatgaaaagaaaaaaaagaggtatatagaagtaatagaaacatttgaaatatgggtagttctgtggtttaaatagtaaaatcaaatcaacagaacacaattgatacctacctgactagatcaatgagttggtatactgtgaatagatcataatttggtgatccgattacgtaatcgctgtttaattcaaatcatagaatatcttcttggtattagtaaagttatcgttagtcaatgacataacactaggttcactggacaagtttttgaggttttgaataaaagtgtctctattgttgaaacttccggaacgattttcagaaaatgttgatgtttgactatcggatctatgtgttgtttgtaataatggtaacaaagttacctttaatccatcaacgatgagtttaaaacctgtagcgtcagctcctcgtggtaaaattatatctgcattctctttggtatcattgatgtacaatttcatctcttgacgggaataatttaaataaacattaagtaacttctctaattttattttttcttgttcttttaaatcttcaacttcttggtcagttttaccctcatgtgactccttcaacacatcacgtttaatccaacgtcctagcctgacatctgcatcacaatcaataaatattctaactgttgctaaatcacaaatttgtttatcaaataatgcatacaatccataaactattatcacttcatattcaattctatcaatataaaggtttaaatcatctcttaatctgatgaaatcataatcatttggttgtcttgaaccaagtttctgcttttctgatgttatcaagtagttattcatattgatcaatttaattgatattttactacctccaaataacttttctaattgatcttttaatatataggcaccggatcttttacctgaagcatgaccaccgctaatcagtgctacaattgcgccattgtctccgtgtgaaagtgtcattgttatcgatattatacctaatcgaaagaaactagatgatgtttgatggcccagtaaccttagttcgagattagcatgaatccgaattttttttattatgataaaatttttctattatcacaagttgtgttttgtttctctaagtaagagatactggacaagggatctatatatccaaggatggaattcaatagagagcttgataatgatttaaaattcagtagtacttccaaaaaagttccagtcacttcaacatttgaagctatgggactcaaggagaatcttttaagaggtatttatggatatggatttacattaccatcagcaattcaatcaagagcaattacacaaattatatcgggacgtgataccattgcacaagcacaatccggtacaggtaaaacagcaacattttcaattggtatgctagaagttgttgatacaagtaataaatcatgtcaagcaattgttttatcaccaacaagagaattagctgtacaaattcaaaatgttatacgtgcattaggtgattatatgaatgttaaagtccatgcatgtgttggtggtaaaagtgtcggagatgatgttaaagcacttactaaaggacagcatattgttagtgggactcctggtagagttttagatatgatcaaaagaagaaatatcgttactagaaatgttaagatgattattttagatgaagcagatgaattattaggtaaaggattccaggaacaaatttatgatatttatagatatttaccgcctggatgtcaagtcgttgttgttagtgcaacattaccaaaggaagttttacacatgacaaagaaatttatgagtgatccagttaagattttagttaaacgtgatgaaattacattggaaggtattaaacaatattttattcaagttgataaagaggaatggaaatttgatacattatgtgatttatatgattcattaactattacacaagctgttatattttgtaatacaaagaagaaagttgattggttaacaagtgaattgaaaaaggcaaatttcacagttatatcgatgcatggtgatatgaagcaagatgaaagagatagaattatgaatgaatttagattaggtaattcaagagttttagtttcaactgatgtttgggccagaggtattgatgttcaacaggtttcattagttataaattacgatttaccaactgatagagaaaattatattcatagaattggtagatcgggtagatttggtcgtaaaggtgttgcaattaattttgtaactgaggaagatgttacaacacttcatgaaattgaacaatattattcttcccaaattgaagaaatgcctgtgaatataagtagtatcatgtaaaaattatttaataactttgtatattttatcgttgttctgtttgaaaacattgatcaaatgattaagtctttctgtacttgtatttgatctcttggttatttcatcaatacttggtattttacaagaaaatccttcaatttcaatattccaggtgttagtttccttgttgattttaagttttgaagatgttggttgccattgaggtgataaactttcaagttcaacaatagtttttgtagttatatcaacataaatataaagcaacaaatcttcatcatcactggtatcgtcggtagattgatcattggggtcattatgatctgggagttctataactttgtagtttatattaataattcgtttatcaaatatcggatctgtacttccttcattcaaagttaaagtgtcaattttgtttatcaaagaactatttgattcgatgtttgatgaattgaattgtgaaatttcggacaatgactcctgtgttgttttctcaattaagttgctagtatcgtatattgtaacattatagatagacatactattcagtattattcattcaaaagaaaaagatggaaggaactccttctagtaaaaggctaatgcacgactttaaaaaatcatgaactacgtacatgcacattaagtggttattattaaatttatgggtgtttataaaagtattttctacagattcaaataaaagaaaaaaaaacttatttcttcttgttagaggttgagttctttggtaaagctttaacgaaaggaataaattctggttcaccaggaatgtattttcttaaaacttctggaatgactaaaccatcttcagtttggtagttttctaaaacacaacagagagcacgttcagttgcacataaagtagaatttaaacaatgaacatatttcttttccttttggttttgagttttaacaccacatctaatttcaagatttcttgattgataatcagtacaatttgaacatgaaactaattccttgaattctttttggtatgggaaccaagcttctaaatcgtatttctttgcagctgcattatttaattcacctgagacaataccaacaactctatatggtaaacctaaagattgatagaaaccttcagaattagcaatcatagtatcaaacatttcccaagatttttctggttcagtaatacagaattgttcaattttttcaaaagcatgaactctgaaaataccccaagcatctttaccatgagaacctgcttctcttctaaaacatgaagaataaccagcatattgaactggtaattgttcagctggagattcgaaccattcatttgagtgataagcagaaattggttgttctgaagttgcaattaaatatttttcatcatcaccatcagtaactttatataattcttcatcaaattcagataattgagcagtctttgccataacatctttattcatcataacaggtgattgtaatggagtataacctttacctgctaaatatgataaaccataattaattaaagcttgatttaagaaaacaccatattgtcttaagaaataacctctgtgaccaacaattttaacacctctttcaggatcataaccatctaatctaagtaaaacttcatgatgagataatttagctggtttaccagttgcagttgcaacatcagttaatttatcaaattcataaccttcaggagtccaagttctaacaagttcattattttcttcatcatttgaggtaacaactgattcatgaacaatattaccaacttgattaactttccatctaagttgtttatcagcttcttgttctgcatcaattgctttcttcttttctgcaataatttcatctttttcctttaaaagttcagaagcatcttcctttgccttaaattttaaaccaatatctttttgaactttatttaattttttatttaattcatctgcaacgaatcttaatctaacccattccttatattctgcgataatttcatcaacaatttcaacagatgcacctcttctcttttgagattctctgataatttctggattaccacccttttcttcaataaattgtaagatatctaacattgtagtatatgttttgctactttaataagagttaataaaaaactataaagtattaatccttttctgttccaaccatatcagattccattaaacaatcattgaaacggcagcctaagagaaaaaaccatgtggaaaattaaaaaaaattgagtaatttcgagggttttagcttttactatgggagcgtcgcatcgacctgtgtgtgtctttggtaatgtcttgtcttgctattacatcttgctatgcttctagtagagtatagtagagtagagtagagtatattaaagagtattagagtattagagtaagtattgattaaaagaaattgaattagagtaaggttataaaaaaatcattaagcacaggaaggtgtagtataatctctctttggtataactgttaatggagtgtaattgaaaagtaattgaccaaagaagtaacctaaaatcattgtaatgattaaataaccattataatacatccacattaacatgataagataagaaactgtccattccattaaatataatcctgaacgaccaatatgttcaacaggacttggataaatttcatttttctttttttctaaccatgcaagataccatttatgagagaatgtgtttagcagtggtgtccaaaaatcagatcctggtgatttaacattgattttattctctgtattatcattattaattgatttatcagtctcctctgtacttggaatatcattatcattacattcaccttcattaccaccacagcatgatgcacatgtatcaatattaaatttttttactttataatcaacaattgcattatcgtattcaactataaatctatgaaaccaacaatatgcaataacccaaaaaaatacaccaatacatgtacctgcaaacatacctcttgaggtaacatgccaagttttagagaggaaacatgaatcaattgtataccaattccataacatagaaattttacaagcatgtggatcctttacggctcccattgccatctttgcttgaacttcattaggtaaaaaaatatcattcatttttgtttaatttatgtgtgatttactgaatttgtgctaccaaagaggaattaataaagtgaaaataaaaagaatttggggaaaaaattgacaggtacatgggatgatataagaagtcaagagttcgtcatgataaaaatttgaaagtgatcaaatatcttgataagagcagatttacttttcttaatgaaacaccaattaagtgataaaggtgataaaaacgcttaaattttaaaaaccataaaatttgctatgtgataatttgctcattttgagttcatttgttccttatttggtaataaagttatcatattctgtaatgaatacctttctaatgggttttccttaaattattatgttacattggtatgtttagatagaaagggtgattgtatacttatatttaatggggtatatcccctatattttataaaaattgatttttcgttacatggtagcagatttaatttttatttcgtttgagtaactatgaatatgaatacaatggatatgggaggtatgagtatggatatgacatcttcaacgacctctgcaatgatggatatgaatactgttacgtacttcaagtacaatggatatgatgaatatgatgagtagtggtattatgacaagtataagtagtatgtcaactggaatgtcaggtatggatggtatgagtggtagtaatagctctactgtatcatcatctagtatggatatgatgatgagttgtacaatgtcaatgttatggaattggtatactgatgatgtttgctttatttctaaacaatggaaaacttccacgaaagctaaatttggtggtacatgtgttggtgtctttgctttattgttaataattaattggtggagacgtatacttgttcaatataagattcattgtacagaagtacgtaaaattgaagtcaatgatattattaaagcaggtataattattgataaaaaaaaatcaacctttgataattttgatctaaataagaatacaggtatgattacagaatgtatgataccattaatggaagcatttaaacatgaatggttttgggttttaaatagaaacttatcaattgaaattgatgacaaagtttatatttatccaagtatttgggaacatacacttcattgtataggagatacaattgaatggtctgttcatcatgttattatgttgttatttatgtattttaatggatttgttttcatatcatgtatgattggtgcaggcgttggatatttattatttcaatataaaaatattaacatttcaaagaggggtgataatgtttcaaagagatgttgtttatagttataagtctttgatgcttttctttatatatacgtttaatacttaatacttaataaatttaatagggtattgtctcaccagccgcatttagaccatatgtggcgcgtgtatttttactacaacctacataacaaggtaatcttaagtatcatgtattgtgatataacatcaatacaatcatatagacctcatatcatgataacaatttcaaatgaatagtttagtgatattaaaaataaatagagtatatactaagaataagaataatagtatatgaatatgaatattccaagattattttgttggatcgtttctttggtaacctaaataaccactaactcttgattcaggtaataaagccaaatatttatcagcaatttctctacaatcttcataaccatttggaccattaactttaaaacaattttctaatgattttctaacaattttaagaatttcaactttaacaaattgttcctttaagagagattcttgtgcttttttaagatcatttgcatttctgtaatcaatttcatcaaatgaaacttctggagcgtgttgaaactttgattctgtaataaattaatgaaaatatgaaaaggtattaaatgttagtaaatagttcagtaattaaatattgttaataaagtaaagcaaaaatataaatatccacatctgttatcaatacataccagccattgtaagaggaactctgtctgtctaatgaatgaaatgtaaagattatactctactataactagctaatcccctcattggaaaaacatgaagaaatcagaaaaaatcttgaaatctgtgcaccttaaattttaacatgatattaatatttcatcaacatgattattattagttaataatacatatcaccattactttcaatgatctttaataaatgcttgtaattgtctccttttatcgtgtttgttacgtctattattagtatttgtacactctcttttgatattctaacttaattagttctaatctcagacaacctatcacctctccgtctatcaaaagaaaaaaaatggtatcttcaaaaccattacttaagattaacgcacaatttgttgcaattgctcatactttatgttcttcaagtgctttcattgctgcttttattattggttatagcttacattttgaaaaaatcgttagaaatgaatattacggttatcctgatgaatggttcccaagtgtttcagctacaattggtgatagatatcctgaaagatcaattttccaaatcttaattgctttaacttcaggtccaagattcttattattattctttacttatattagattatttagaaaagattcaaaattacctaatattgcattattttcaggtttaataagaactgtcacttgtggtggttgggtttatataacttcaactgataatcatgattggcatgatattttcatgatttcatatatcgttttaacattaccttggaatatatcaattcttaaattaacacctcctagaacttcaattcataaatatagaaaattaacttcatatgcattctttggtactttaatacctttaatttatttatttattcaacataaaattcatcatttaccaggttcttattcttattatgcttattgtgaatggttattaattgttttcgatatcttatttgattcttggtcaattatagattttaaagatcttacccttgaaattaatccaactgaacaaaatgatgaatattttgctttaacttttaatattacttcaaataataattcaaaatatgaaaattataatgataataacaatgattctataattaatgaaaaatctttaaatgataaatttattccaaaatcaactgatagtttaaactcttcatatattcaaattttaattaatgtcattaatgcttatatgttttggtcaatttatacttcattatatttattagtttggtatttcccattatggtttatgggtattagtgggtttgaagttgtcattgtatcaactatgagtccagtttttttattaaatacaaaaattagaaatttctcattcaataatccaaataaattaagaatttatggttgtatttttggtattggtagttgttttatttctgatccaatctgtcgtttattatctgtaagtgttggtaatgcatttgctttcatttcattaggtactgaagtttcacttattgcatcaactaaatctattgataatattaaaagttatgcaacaactttcatgttaggtttaacattatcatcaatttctaaatttgcattttggacaaataatccagtttggccaatcttaaatagtaaaacaggtggtttaaataaaattggtttgttaattggtttattatctgcttattatacctatattccaggtaaagttaattttaaaactgataaaactttagaatctccaaaaacttcaattttacctgttgctattggagttggttcttacattttctcattgcatgcaatgttaacagatacctcagttattatcttatgggtttgggatggttatccaattactggtcctgttcctgttccttatggtgcagttacattaactgttatgtgtattggtatttatgctggattatacaattcaaattactataaattaattactataattggtgttattggttcaatcattctttatttattctatggttatttaggttattttggtggtatgttatatactttctggttatcatatattggaccaattgttttccatcaactttcattacattatattaatattggtaaagttttaacaatttcaacattagttactataattataactttaatgcatgtttgggttgttgcatatgcattcgttccaggtgggccattattacgtgaaagaactgatattgttttaggattatcagttttagcaatttgtttattaatttttaatattccaaaatctaatgaaaattcaaatgaatcaattattgataaaaaatcagagaaaaaggatactaatacaaagaaaacttttaaattatcaaaattcatgaatattataatttcattcttattattatcctatattattgcatttaatagatttcaatatacaacaccaaaaccatatcatccaaaatcaagattagtaactgcaggtatttggacaattcattttggattagataatgatatgtgggcaagtgaatatcgtatgagagatttaattcgtgatgcagaacttgatattgttggattattagaatctgatacaagtagaattattatgggtaatcgtgatttaactcaaagaattgcagaagaattagatatgtacgcagattttggacctggaccaaataaacatacatggggttcagcattattatctaaatttccaattttaaattcaactcatcatttattaccatcaccagttggtgaattagcacctgcaattcatgcaactttagatatgtatggtacattggttgatgttgttgttttccattcaggtcaagaagaggatgaagaagatagaagattacaaagtttatatttacaagaattaatgggatcaagtgataaaccaatgattttattaagttatttagttgttaatccattagaaggtaattataatacttatgtcagtgaaaagtcaggtatgcatgatattgatccaagtgatgatgatcgttggtgtgaatatattctttataaaaaattaaagagaacaggttatgcaagaattagtagaagtagtattactgatactgaattacaagttggtaaatttgttgttccattaccaggtgaaattaatgaagattattcaaataataaagtacctgaagtttggattaatcaagataagagattccctgatatgttccgaggtgaaggtgttagagatcatagatatcatgtctttgaagaacctagatatttcatttaattttgtttataatttgtttaacatataccagttgtttatacattaacgataatagtaatataaaacatttacgtaatcatgtttttgttatctcatgacatgtaaacatagatgagaaaaaattccagccaccttccttattcggtagttattcagccagccaccagtgtttaagataaattattattcagttagggatacaatgacatacagtaacagtaatgataaaggggctgtatagatacaataattaaggtttgtctctctaaaatgattaatttatggctgtttcttcttttatcttttcagtcttccccagtaactaatctgtttactgaaacaacccatagctaatttttaactaatacatcacaatcgattaaatcaaataaaacaaaccaatattaatgacaagctcacaacataatgctaaaccatcatattttggagatcaattaagatatgaatttccatcatcatcagaagaatcactaatatcagaaaaagaacaatcaccagttataattgaaagagcaggttctatttttattaaatctggaattccaaaagtttcaccatttccaacaattgaagatgaaaaaaaggtagaggaagtacttagtaaaaaatatggtactcaaagtacaacatccttaccaattgaagaaaaactagatgaacttgaagatattgcagaaattgaaactggtgaagagactaaaaacgttaaagaaaagggtgaagaaaaagttgaaggcatagagacaagtgtagaaagtaggaagagagcaaatagtgaagagtctcattataacgaatctttatatgaagataaatcaattacaaaagcatcacttattagaaaaaggccatcattaaaagctgttaattcaatatcatccagtaaatttgttaatccatacttaagaagaagtgttttaaaaaaatataaaggagaagttgaaaaagatgaagtattaggtaaatttgttgaacaattagagaaacaagttgaaccaagtaatatcaataatactatcaatgatactactttcaatactatgaatattgatgatttggaaattccaaggagaagttccaaaagagttagtcaaatgattaaaagaaatccaagtaagaatattagtcgaatgaatactataagaagtcataatagtgctaatacaattagtcgaagaacatctaaacgtgatgcagatagagttaagagatcattatctatacaaactttagctagtgatgtacgaaaatctattcaaggaagaagttttaaaagtgttgattttggagcattagataaattattagaggaattattagatgttcaaacatcatctagtgaatcaagtgagagaagtttaagtttaaaatcagtccgtaagagaagtatatcacgtcatagtactagaagtagtaatagtagtagagctagttctgttcataacttaaatagagaagcagctgataatggtaatttttttgttgctaatgcatatactccattgattaaaccttttagtgcttctgagaatggaaatagaagtgttaaaagagttgttagtttgaaaagaagtttatcatcaatgcaaaaaagtttacaaccagagactatgatttataataaagagttacctaaaatagttgaagaagataaatgtgaactaaaacgttccaatgcagttaaatataaaaatagattcattgaaagtattatacttctattagacactattaaaagatttggtaaaagagtaattaataattttaaagtttcaagtaagaaagttgttggaataaagagaggaaagagtatgatgaagagaagtaaatcagttaaagatttaaagattggacaaccagtacctgttgatattcatcaaacagcatttaagacacataatttgaatactgaaacagtttcacgtaagacatttagtgttggaggtagtagtagtgataatactaatgaaagaattctattaaattccaaacatttaagtacaattgaatcaattaatgaagatactaatgaaaccaatggtagtagtaatgttgaaaatgatcaaattgtattattatggaaacacttatttaagtacatgtattgccaatagagttgatatgaaactagaattagttaatgcaaataatcttgaaagagttaaatcaatccaaagtaattcaagtaaattaagttcagttaatgaaaagcaagaaattgagagattgatggataaatatgttgcatcagagagttcaagtagaagtgatactattaagaaaggtaatggggatatcagtaaatcatttgattggtttgcaagtcttgaattattaaattcatctgaattactttctgaaaaatcatttgatcataatgatgataataatagttcatcagacagtgaatggtcgactataatgactgatggaattaacaatttagattatgaagattcatcaagtatttcaacaattgaagaagaacatgaagcagatattttaaccgatgaagaatatgataatggattaatgaatttaggagatgaaattaagaaaaattcagctacaactaatgatatatccaaatcttcgcaatctaatattaagaattcagtaggtatgttaaatttacaaggtgttttaaagaatgttagtttaagtagtaaaccaagtaaatcaacattagcaaagaagaagagtgttgttatatccgatattaaatcaatgaacagtaaatataataaggaatttagaactgcatcaccatcaagtttatctagtagtagaagctctagtatatcagatatgttctcattccaagccagtgttgttgtataattatgtataagatctaactagaataaaataatctaaataataatcctaaacccaacagtcccctcatagaaactgaaatacgcgcttgaaaaacaaaaaagctaaaaaatttcaaaactaaaaactttataaatttccatcaattccagcgtaaatggccgcacttctctctcttatcttggaccccatcatgaaaatttatacaaaaaccgttattgtcccatctttttgaggtaccactagttgattggattaattaactgattttttattgaagaaagtattgagaaattgaactgaaaagttttcgctttaggaacacgtgtacttccttctttgaaatgtactctctttctttaacaacgtacaaatcgtgaatccaatgaatcaaactagggaagatgatactaaagcagcggctgaattagatgaacattcagagaaacattcaactcaagacattattgataaaaaattgttgataaatgatattttatcacagtttgctaatgaggacaaggaagcttctctattaattggtgatatctttaagaatcttttggataatgaacatagtattatagactttgtggaagaggcgttgaaggaatgcacagaggaagaaattctcgaatattgtgctgaggaagtaaaagaatttgaagctatgactggtactaagtataaagatattgctaaagatatggaacattttgattctactgatgaatcaaaaaaagatgtttattataatagattgagagattatatgaaatattcctttacaatgggttgggatattaaatctaaaacattaaagaaaaatacgtatcatatttttgattattttggcattgaaatgtctgaaggaattgacaaagttgaagagaaaaaaatttcaaagtacgaagggttgactttttataaagaaagaaacagagcaaaatactgtcagaactatgttataaaaggtgatgagtatttttatgattattataagagaagtaatgattttagaatgactcactgcttatcaattggtacaagttctttttatcctgttgagcaaaacatggattttaaatatgatatttacatgaaatacttagataaacattttgatgttttagagtcaaaaccattattgtttgccccagaatcatttggagcaacaaatcttgaagtaattgaaagtgtttgggaacattgtattccagataaagataaaaaatcaatcaatgcaatttggaaaagtttcaaagactataaaactcgaacttaccctaggtactttgcacaacgatcaaaacaggcacgcttaattgaaaacaatatatcaagttataccatactaacatttttctcaattccaacagatatatgggtttttttctacatacaaaattgaaacaggtaaatcttgggtttcaagtaataaacataagggtaatgttataaatcatatttggatggtttgtaaattcaacaataaatgtaccaggaaagttcactatttagtagactcattacatcaaatagttttcattaagttttacggtaatcaccacgctacctgtgaacaggagaataaaaaacattgctatccagctttcagaaatttatattcacacggtagtggtcatgatccggttaaagttactaaatatttgaaaagggagtatagagattgttatgagtatgttattgcacttggtgaagaaccaacaacaaagattttcactagatgggtgatgaaaaattttgagtttttagataaatctgtttataatccatcattaatgagtgattataggtattgtgttgaattaatgaaaaaatcttcagattctgatgtgatgttaacgatgaaatataacaattattgtgaacttggtatggatggagataacattttgcattattttatttacaataatcaaaaagatttgaaaaatgtaactactgatgattttccaggtttaatattttcattcaagccaatactggaaaaacttatttcatcaaaagatataagttgtgatgttacatttgatttaatcagggacaaaaatgttagatttgtaactttatgttacaaagttgatacttgtgatggtaaggaaccacataactttttaggctgtattggtacattaccgtcaatggaaagcaatcacaattttcaaatattctttagggagtttttgaaagtgtgcaaaaaccattttggagataatatttcaataaaatgggagaatattctcacatatgaaagtgaagcagaactgaagggtattaatcaagtcattggttgtgatgttactgtgagagattgtacagttgagtaagagtctaagtttcaaaaaaaatcttgattttggatgtgttaatgaatgtatgaaggcaatgtattgtttagaggaaaatgaatgtgttggtcgtttattagattgtatggtttattatgataagattattaagaaattagatatcaattcaagccagggtcttgattggaaatattatgctaaagggaagaataaaacaataaataatgtgaaaactaagcattacaataataaagaggcgattgtcttccttaaaaagaaaatgttttacgtttatagactattccatacaagggatagatgggcattttatgctagaatggatataaataaattcagtaaggatgctgtgaaaaagtttgtaagttataacaagaagcaaaatcataagacacttaagttaaagctattgacgtggaattttgaaaattttaaagaaaagttaatttcccaatatgatatgaatgaagaatttgaaagatttgatgattatatggtgaaagggagtaagaaggtgtttaaggatgatagtattataacttcaagtgatgaaattgaaaatattgttatgatgattaattcattttttacaattaatacaagtgaaaatatgcatagatatttaaaatatggacaattagaaattcataatttatctaatattgctattttttcaaataaaattaataaatattttgaaatgattgaatcggaagaaattgggggtgtaaattctacaagagttcaatcgattatgtctaagaatggattttccgagggtataactcgttttagtgatatgatttcggatgataggatagatgaaagccctagtaaaagagtgagaatagatagggctagaactgttgataaagatgataaagatcgtgataatgataaatacccggaggaatttgtgaggggaatatttgaagatttgagagacgcatttggaaagatactttttcaccctactgttaaaggagttgaaatgcttatatttgcaacaaatataatcagtgaatatagtgatgatccatttcccattgatttggaggaattgagaaataaattattggctgttgaactagtttctgatgatgatgacgatgattacgatgatgacgatgaggatgagggtgatgattacgaagatgatgaggaggaggaggatgatgattacgaagataattatttggaagatgcaaattcagaattatatccaatgatgaattcaatgatgaattccatgaaaatagattcggattcggattcggattcggattcggattcggaagcggaaggaaaattgacataatattacgtaataactccgtagataataaatagtaaataccggccgtcacagttttaatttttttaatttttttaatttttttaattttttaatgtcctcttaggcaccagccgcacccggaaggaaagggtctttttttattttttttccttttccttttccttttccttttcccttttcttcattccgagatagatccgtagagactccgagggcggttaatctatgggtcttttactgttctgtatattatagtattgtttatacggaaaataatggataactggttagtatacagtataattacttctatggatataagatattaaattaaaagaaaatataatgaccatattgaagaccatggagataagtttaggatttaggatataggaaatagggtttaatggacataatggggataatagaaaaattgatttataatacagccggtttttagtaattgaatttttaattttttaattttttttcttttcatttaaatacccttctggaccccctattttctatacgacgcatgctttgatcttatattaaagtgtatttttatatattgtattatattatattatattatatcatatcaaagttaaataaatgatgaaaacagatataatggtaccaataacagatattgtagaaactgtttcatttggtcttgtatctaaattaagaaagaaaactcatatctatgatgatcacgttcaaacaattaaagaaaaagatgaaaatagtattgattttaattgcaaacatattactaaaaaaatgacaaaatcaagttcagtttgtaatacaatttctaatacaattgatgaaaattttaatcgtcataatagtgttaaagttaaaaagagtaaatcagaggaacaatttaaatctgaaattataactgctgcttatacatttaataattcattacctatgattcaatcacaatcttcatcttcattcccatcatatgattcaaatcgtcaagatgtatttactagatcaaaatctttaaattatacttcaaattattcatataaacgtccaaatgcaattttctcgattcatgatgatgataataataaatttagagaatcatcaaaatcattatctccaactcgttcatcaatatcaactccaaaacaaaaacttttatctcactcaatgaaagatcgttttgataaaaattctaaaacttcattcctcaaaaaataatactttaactaatgattatatcaatcaaagtaaaagaactaactcatcttcgacattaactaatagttcattaaaatctaaaaaatctactggttcaacaataaattcttcaacaatttctcatagaagagttacaattgctgataatgtaactgatatggaaagtggtgaaaaattagctgtaaataataatggatgatgatactaacacgagaagattcacatttgaaaaatttacaatataatgtttataatgatggtaatgaaactgataattcatcattttattcattttctgaacaacatcaatttaaattggttttagatgatcatataacgcccgaattataaaatttcaatgcatataacatcaaagtcttttctaataatctctaatctgctttttccttttttctcttcttgttatatactagattttctcttttgctttacgtttataatatcatacgtctataatataataaaaaatatattaataatcaattattaaaattaaactataaaaatatagcaaagatatacaaatgtgattaaattattactaaaattacaaaaattctttatcaacgacaacttcaagtgttggtgaatgaagtcttctaatgttaatttctttactagtatcttcttcttcatctttttcatcttctattgaattatcactttccatatcttcatcatcagttaaggtgtctggtaaaaaacatgtttttctttcagttgtattataattctttaagaaatttgttggacctggaatgttccttaaatcaattgattgttctggttcctcttccacttccatttcttctttttgttcttcttcaataaattcttgttcttgttctggctctggcttttcattgacttcttcttcaacttccttttcttgctcttgttcttgttcatttaattttgtttcaacatcatcatgttgtctgttaattttaacatcatgatgttcttcatcatcatcaattggtattctaatctttcttgggactattatttgaactgaatgaattaccatttaattaatcttaattagagaaaatatcagggaaattcaaagttattttccattattgaatgattgtttgatttgaatatttttaatttttggaattgaaataatcattgaataaccattagttcaagagtttataattaatattattattaatatcaatatttgaaggtaatttaatattctttaaagaaattatctcttgatgatttaataattaatgaataattttcaatttgttttaatgaataaccatcaaatttactaataaattgataattacctctattaatatttttattaagtagaatataataattatcacagtcttgatcaaattgaatttctggttgatttaatctttgaatttgtctcttctcaatttgttgtttcttatatagatattccctttgaaattgatctaataaacataattcattaatattgctaccaaaagaatttgatggacatgaataatattgtggttgttgtgattgtctgagtaaaaacattgttaatttattgtaatttgatttgatttgggttgatttgtttgttgataagagaaacaaataaacaaggtacaagagaaacgaaaatggaaaaagaaagagaaaaccttcgacttaaataggtagcagatcttcatgataaaccttaagctgacaaattccatagttataggagttgagccccgtttggaaaagataagaattttctagaagaatttcccttttcggaaggtgatggaattttctggaaggatgcgacatgtgttttgttgtgatggttctctcttttagatggtttgagatgaatcagtgggtgttgggaaggtaatgggagggtttagatggtgggtgtagtaaatgtgtaggtggtgtaatgttatagatctagctaatgatggtgattatagcttttatggtgtgtaagtaatacattaaatagtatttgacgagccacctaaaaagataaaatcactgttttcacacattgacctaaattgatttaagtattttacaaattattttctaacttctatttacaaaatatacacatacaattgaatactttatacaattatgaatgtaggaaatcagcatttgtatataaatcaagcattggattttcaccagattttgtctttgtcttttcaatatctgcccattgttttaaaaattctgcatgactacaagtaaatgattttttaccatgtaatttccatatataattcattcataactttaaaatctgttgggaacattatatcaaaatatccttgatcaaccatataagtatctgtattaatcatattatctttatacattgtttgaactgttggtgaattataacctttaatagttttatcaaattttgaaaaatctgatgttaaaattttatgatttgggaaaaattcttttaaaattttaaataatttaattaatcttgttggtatatattcaggatctgataaattaactctcattggatttaacatatccttaattttcattattggataaaattgatttaatggatgatttttcaatgatttaattgggaatttactattttcacgtaattttagaaattcttttgttgatgattcaatatctggtgaataatattcatggaaatcattattttcatctattacaacatatccttgatatggctttctttgtatcaatatcatatcttacaacatcatgtgataaattatcgaaaacttctaatgcaatgaacaaaacatggatccttcaactaatgtattccaatcaaatatagatttattaacaacttcaactctatttttatgtctatctaatctagaattttgtttattgaataattttgaagaaatttcaataattctatattttgttctattataaatttcaggttcattctttgctaagaaatctaatatattaagcattaatgtaccattacctgcaccaatttcatatattattaattctttttcttctcctccatttataggattttcttctttaaatttagataaaatatatctagctaaaccatcaccataatatggttgaaacaattcagttggtgtatgccataattgtaacgaaggtttggcaattttataatcctctaattttgattcttcttcagatttagtttttttactagtattagtattcgtacttgttcttgaagatttcttatttgtactattactactattactactactttcattagatcttttaataacttgaagtgattgaattttttcttgatcatatttatcataagccttgtaaccatttttgcataaattcatcttgaccttctaattgattataatcaaaaggtttatcaggttggaaaattgttgcttcctttgtaaaataaccataattaacattataaagtgaatcatcaataaaatcagatgttaacattttaacacttttaggtttagtcgatcttttatttaatttacttatattagttaatggatatcttgaaaatttttcataatttgcatttaaatccattgattcaataccaccttgttcaaaaattaatttaattaaatttgaatgtggttttggtggttgacctttctcttcctctgttggtaacctatgttgtaaattttcagggaaaatagaataatcatgaatgaatgatgttttattatctttattatcctttttcatctttaaaattgccttaccctttgcagatgtatttgaatttgttgaatcattattatcaattgcagaatctttatttgatcttttaataattgatttacgagttgagatggatctttttgtcaattcatttttagagaaacgtatatttctcactctactaaccaacatctcaatatctttaccactgtatctataacagaccccagtctattccatcagtaaagatagagatagagacctattcatgtaaatagtggaaaacctatcaaaaagctgcacggtgtaaggatggtgaaaaataattttttatcttgaaatttttcactttgctttgttatgtattatcaataaggttaaggtaggatatatctgcttttgcttggatatatattagtagacaaggacaatagagtatttgaagtatgggtgttcctgcacttttccgttggttatccaagaaatatccaaagatcatatcttcagttgttgaagaagaaggtccaattattgatggaattgaacaaccaattaattatgcagatccaaatcctaatggtgaattagataatctttatcttgatatgaatgcaattgttcatccatgttcacatcctgagaatagaccacctcctgaaactgaggaagaaatgatgatggaaatttttaaatatactaatcatgttttaaatattgcaagaccaagaaaattattaatgattgcagttgatggtgttgcaccgagagctaaaatgaatcaacaacgttcaagacgttttagatctgctaaagatgcacaaattgctcatgaagagaaacagagagaattagctgaaatggaggcaagaggtgaaataattgatgaaactatcaaaggtaagaaatcttgggattcaaattctattacacctggtacaccatttatggatattttagctgcaagtttaaaatattgggttgcatataaattatcaacagatcctggttggagtgaattacaagttataattagtgatgcatcagtacctggtgaaggtgaacataaaattatgaattttattagaagtcaaagatcagatcctcaatatgatcctaatgttacacattgtattcatggtttagatgctgatttaattttcttatcattagcaactcatgaaccacattttaaagttttaagagaagatgttttcgcaaaggatcaaatgcaaagacaattaacaacaaaggatagattatatatggatgatgaaacaaaggataaattgaaaaatgctaaacaaccttttatttggttacatattaatgtattaagagaatatttacaagttgaattacaggtaccaagattaccatttaaatatgattttgagagagcaattgatgattgggttttcatgtgttttttcgttggtaatgattttttacctcatttaccatcattagatgttagagatagttcacttgatacattagttggtatatggaaaaatttattaccaaaattaaaacattatattacatgtgatggtattttaaatttagatagagttgaaaaattattatcagaattagcaacaaaggaagataatattttcaaacaaagacatgaacaagaaatgcgtagagaagcaaatttcaaacgtaggaaatttgatagagaacaacaaagtattgttcataatcaattattacaaagtgtttcaaagggtaaagataatgcaccaattaatccatcatcaaaatatgacagttaactaatttatcatctaatactggaagtgaaggattgaaaatgtcaaatagtgatatagttcaaaatataagtgtgatatcgaaggcaaatactgctaataaaagtgttgccgaagttttaagagaaggattaatgaataaggataagacagttgaagaaaaggaagaaaataaaattggtgataaaagaaaaccaattgatgatattgatgttaatcctgaaaatacagatgaaactaatgatgatgatgatgattttaaggatgaagatattaaattatgggaaccaggatataagaaaagatattatcaacaaaaatttaaaactaataatgaagaagagattgaaaaaattagaagaaatatggcattttcatatgttgaaggtatttcatgggttttattatattattatcaaggatgtccatcatggaattggtattatccatatcattatgcaccatttgcatctgattttattaatttaaatgaatttaaaattaaatttgaacaaggtaaaccatttcaaccatttgaacaattaatgagtgttttacctgcagcatcaaatcataatttaccagaaattttcagaaatttaatgtcagatccaaattcagaaattattgatttttatccagaagaatttaaaattgatatgaatggagagaaacaatcatggagaggaattgcacttttaccatttattgatgagaatagattattaaaagttgttagatcacaatatgattccttaactgaagatgaaaaaaatagaaatagtcataaaagtgaagttttatttattggtaagaaaaatccatattttaaaaaattttctaaactttatattaaaggtgaagataagaaaggtaaaagtgaaatttcatttaattttaataaaacacatcttgcaggtaaagttaagccatataaattttataaacctgatgataaatttaagttcccatttaataataatgaagaatataatgatttaaataccaatgatttcttattagcagaatttgagatgccaccaaaagtatttggtaaatcaatgttattaacaggatatagaccacataatccagttttaacacatgaggataaggaaatgattttatattttagaaattataataataataataataatagatttaataataatagaaatcaaggaattaattcaacaaatattgattataaattacatacaggaccatatcagaaaagcatgtattcattaagagctggtggatatcagtatttcttcaatatgtataatcaagaaatgaaccatcaacaacagacaatgaattataatcaaggtagaaataatttcagtaatgcatatcaaaataattatgattcctatgcatcacctaatgaagggtataataattataataataataataataattataataatggttataataacaatggttataataataaccgaggaggatacggcagaggaggatacggtggcagaggaggctacaacagaggtggatacggtagaggtaggtagaggtagaggttattagatactagatattgatataagaaactgtgtaatcttagctatgttaagtgaaaaatttattttattttatctactacgcgtaataagtattctcttcttttaatatggataagagtgtgttgtttgctgaacagttgacggttagagaggatagtagcagtaggggggatggtaatagtagtaatggtcatgatataagagagttatctaagaagatcgataagtatagacagaataaagttagtaaaccattaccattacgcgtaagtagtattaacactacaaacacgttagagaggttaagtttattaaatgataagaagatgaagaaacagagacaagatgggaataatatggttgataataagtttaagaaaataccacaatcaactaataaacctgataatataactatattaacagatgataaattatcaattcaatatgagaaaattattgaaaatgcacgtaatttaacaacatatggtatattgaagaataatggtaaaactatatatgaggatcaattaattggtaaaattgataaaatacagataataagtgattcattgaaaattataatagtaaatgatgatttaatggataaatattggaagattggaattgtttgtttatggaatgaatggattgaaattaataaaggtgatacaatactgttacctgatattgatttaaattctaataatgaagaattacaatggagttttaaatggaaaaagattgtttcattataaaaaaaaggaaaaaaaggaaatgtatttacagagggtagtagattatacttatacttatactatatattatgagttttctcatataataattcagagaatctttgaagtgattcctttatttcaatatttgaagaattttcaattaatggataatattcattttcaaattttgaacatattacaccatcaccacaaattgatataaaaggtaatgcagcatttataattgataaatcatttctattaattgcattatctaaaactttaaagaaatgaatccaattatttctatttgcataaattgttaataataaaagatcaattttatgtttaattaatctttcatcatttaatttaaaattacataattgatttgataaattatctagtgaattaagtaaatttgaatgagtaaataaattttcttgttgaatattaaaagtatttaaaattttattcaatgttaaaaatgaattatttgtaaaatttgaacatgaaataattaataatggtaaaaaatttattatttcatccttagttaggttaattctataattttcaagtatatgtaaaagaaatttattttgatatttaaaattatcagtattatttttaatattaatattttgatgaaattcagttgattgtaatatagtttcaaaatatgatgataatgattgataatttaatgtaaaacctgctttataaattttatctaaaaattcacttatatgggaaagtgggaaaattttcatgatcaactaaatgtaatttaagtagttttctaaaatgattattgtaattatctgaagttaaatcaaattgattgaaagtaggagtggtatcactataatttcttgatgaggtatgaaaatatctaatacctctaaatatattatcatcattattaaatgaattattttttttcaaatattttgatttatctaatttatttgaccataaatattctaaatttaaatcatttcttctatcttgagttaacatatgaatgataataccatcagttttagtatctgtcattacccaagtatttggagttacaccataagtttgttttgaataatttggagcagttttaccctttttatttaattttctatgatattttgctaatttaccagttttcaatataccttcagttaaaggtaatttatgtaaattatgtttaatataaaattgtaattcagatgatgctttgagtaaatgttttgatgacttacctgtacctaaaatcataaaatcagcaatatcatgagcaccttcaatttcagatgaaatattttcactattagagatagaatttgaaatagaatttgatctcatatcaaatataagtaaatcatagatacctaaatcatttgcaagaaaatgagttaaattttccaaagttagaggataatttgggggcatttcaggtatttctatagtatttaaaggagatgaaatagcgggagattcatttggattcaaataccatggagtatcattaagtgaagatggagtagttgagaaatgtgaagatgacgatctgaccaatggcaacacagtccttaaaccaatagacagagaccttacaacccttacacagttaacagatctagataacatccctgcttattaaaagaagagaagagaggtaagtgtattaataaggcctgtattaataaaccaagatattaatcagccaaagcggaaatcgagaacttttctttttctttctctggtgggtatttaaatatcaacctgtttcttctttttattacttctcttcattctttatgttctttagacaagtaacttctatcaacagtagattatctctattatcaacaacaagaatggttcacaacaaagtcactatcatcggttcaggtcctgccgctcacactgccgctatctatttagctagagctgaaatgaaccctgtattatatgaaggtatgatggcaaatggtattgctgcaggtggtcaattaactacaactactgaaattgaaaatttccctggtttcccagatgctttaactggttctgaattaatggataaaatgagaaaacaaagttctaaatttggtactaaaattattactgaaactatttcaaaagttgatttatcttcaaaaccttttaaattatggcctgaattttatgaagattcagatccaattactaccgatgctgttgttattgcaactggtgcttctgcaaagagattaggtttaccaggtgaagaaacttattggcaacaaggtatatcagcttgtgcagtctgtgatggtgcagttccaatttttagaaataaacctttagctgtcattggtggtggtgattctgcctgtgaggaagctttattcttaactaaatttggttctaaagtttatctcattgttagaaaagatcatcttagagcttcagttattatgcaaaagagagttgaaaaaaatccaaaattagaaattttatataatactgtttcattagaggcaaagggtgatggtaaattcttgaatgctttatcaattaaaaatgttaaaactgatgaagttaaagatttaccagttaatggattattttatgcaattggtcatactcctgcaactcaaatttttaaagatcaattagaaactgatgaaactggttatattattactaaacctggtactgcttcaacttcaattgaaggtgtctatgcagctggtgatgttcaagattctaaatatagacaagcaattacttctgcaggtaccggttgtatggctgctctggaagctgaagcttatcttgcatcattagaatagatgtagtagtatatgtatagatatagcacatcattttttatttatttataatccttattatagttgtataatataaagataaagaaacatttaaagtatttaatttaaagtagtattaaaagatgaaatttttaacatgaaatttttacctaataaattattactatagtagacatacaccatttctttctagtacatacaacgatatatacccatataatacaatgaatttaaacgtcaattcactccctacagagatactgattgttatattatcatatactgatccacttacattagaaaatatcccccttgtatgtaaaacttggtataatatacttaaagatgatacaatttggaattcaatttttaaattacaattcccatttaatagtcaaattttcccatcaatttcaagatcaaataattataaaactgaattaataatacgtagtcatcttattcataactttaaacgagggaaattattaaataatcattataaaattaatcatattataacaaattcatcaatttcaattgattggtttagaaataaattaacaattattgatataccaagggatacaataatttcatttgatttaagaaatggtaaaagtcaaaaatctttaaatgatttccaacctcaaggtataacaagttatgatgctggtacttcatcaaattcaattttaggtagtagatgtttaattttcggtagatgggatggttcagtttatggtgctttaattgattataaaggtttaattttaagtgatgtacataaatggaatgaagtttcaaataatagaattacttgtgttacttcatgtttaaatatctcaaattctattaataatatgactattaataataatactaatagtttgaaatttaataattatatcgataaaattaaaataactaataatgatacctctcataatcaattaattaaatcaggatcaattggtgcttttagttgtgatgaatcaggtatgatttttggttgggatataagaaatggtgattgtctctttaaattgaaattatttaatgaaaacaataaagttattaaattacagagtgatggtaaaacaattttaatttgtttattagaaaatggtgaaatttgggtaattaaaaatatttttaaatctttaagggataattcaattaaaattgaaaaatttaaaattggtattataccatttgatagatataattcaattttattaaatttatttgttgattatggtaatgaaactgttacaatttggaatgaattaaatttaattatttattcattttcaattgataatttatcaaatttaaatttaaataataaattaatttatgaacctccaattgatacattaatttcatcagttatatttgaaaataattctaaaatgtttattaaaagagatttaaatattgttggtagtgatcctttattagcatcaattgttttaaataatggaattattaatataattaatattagagaaacattatcaacacatttattaaaaccaattaatttaaaaccaattatggcaaaatttttaatggaaaatgatcatataaattattataataattttaatacaaatttagatttaaatatttcaccaattgcatcagtttcaattaattcagttttcattgcaattgcaagtcatttaggtaaagttgaaatatttgatttaatgacaggtgaatatttaagaactgtaattgataaaattggtaaaaagaaatttcaagaattagagaatataacaccaattagaattttcaataatttaattaaattatatattgatgaaaatttaacaagaggtttattaataattggtaattatttacaatatttcctttgtggtaattctaaggatgataataattttaataagagaaatgataaaaaatttaataataagaaatttattgataaaaagggtgattcaattcatgatattaaagatttaattggtaattatcaaattgagaaagatgaaaatgataaagagaaacaattattaattaaatataatggtaatacagatgtaattcataatgatgaagatgaattaaatttagcattagttatgagtttatcaatgaatgataatagtaatgacattgaaaatagcagtgaatttactcctataaatgatgatgatcatgatatggatgaagatttaagattagctattgagttatctaaagcggaaaattatagagaaattgatgaagaacaatgggaagaatttatataatatataataatatatatttatactaccgtacaactgattcagatttaaattttatacttgtaaaacctatattatcattatctaattgatttgaatcaaaattatttaaattaattggtgataaaatttttaaacctctaacatgacaatctttaccattttgatgatttgaaataaatttaatttttaaaatataacattttaataaaccattattacaaatattttgaaaattaatattttgccaaccaattggttggaaaaattcataatttaaaacttcaattaaatcatgttcaccactaccagctaaaattttaattttttcaggtgtataactttcatcaattgaataattaagataaaatgaaatcatactaatattaacacatttagtaaatttaattaaaagataatgtggttgtggtccatcactttgccaataagttgaaattaaatcatcccttaatttattaatttcacaaccttgttttgatgatgaaacttcacatgatgctaaattacttatatcaattaaaccttcactttccatctcttgaatacctcgaagataaattacttcctcatgatctacactatctacaggttcttccattacgttaattacacttatctatactatccctacctaaagaagatagatggcatgtcttactaccttaaagtgttgatgatgataatttcgcgttaaagtattagtatattattaagtagtatttatataaagtttataaagagtgcattatattatattagatattggagggtatttatttttttataggttatggtatggatgactaactgttatacatctcaccaaagacattatagttgaattcaattaattggtttaatctttcaactatattgtttaattcatcattaataataatttcatcattaatctttggtaatgaagatttaacaataattgatgattcaatagtgtttgctgtggtattaatgttaacattattggtattgatattattattattattattagtattagttgtaacaattgatgaaacagtttctgattgttttgtagaattatctaaaaatgggaagattttttcaaataattttgattctaataatgaataaacttttgaacttggttgagtttgattaattaaccaattattagcaaattcaattttatctgaatctaatttattaaataatttattaattaaatgaattgataaatttttcaaatttttagtccattttgaattaccattatcatcaattataatatttaaaatttctgattttaaatttaaaatattttcattatttaataatgatttatctaaattattttgaaaaattaatgttttgtataatattaaacataattttgtacaaattatatgtctaatatcagctcttaataataataatcttgtattatcaaaatttaaactatttgggaattgacgtgtcatatttgaacatgataataaatttaaaattgaataattaagtatttcccttgaattataatttttagattttaaattatttaaatttcttttataccaaataattgaatttgtaaaattaattttattacgtttaattgcatttttaaaatattctttttcaaatgaaacagctgatgaacataataaaggtcttaaaattctaatttgatgatttgcaacatctaatttcattgcttcaagtattaaaaataatgttttaaaaccttcaattaataaattaatttcaattttttcattattacaagatttatgaaataaattatttaattcatcaacccaaggatctctcattggagcacaatgtaatttaaaaattgaacaaatccaatttgaaaaattaataaaattaaaacattttgaatttaattgttgagttattaaactaatatccattatttcttcaatttgaattatatcttttgcaggtatcagactaattaaaatacttttcaaacattgaaacattacaattattggagaattttcatttaaaataattttattatctaaatcattaattaaattttcagtttcaattttaatcatattccaataattatcagattgatttttctttcttttacctctttcaccatctaaatttggtctaaattgtaattgaggatcaaataaaatatcatgtctaagttgaggattttttaaaacttcttgtaaatcaatttcatgcattgaatgtaaatttacaggaggtaataataaagatggttgttgttgatgttggcgatagtgatgatgatgatgatgatgactatgatgactatgatgactatgattatgttttggttttgatatggtattatttgatatatttaatttgttgttcttatacatatccaaaaacatttgatgtgaatgagtatttggataaatatgagaattttttgaaggtatgaaaatatttggtaaagattttgaacggaattttttagttattttaacagattttcttgattttgaagaaattttttttgaaattttattagaattatttgatgattgtaaattattaatattattattatttggtaaattaagcatttggaaattagatataaattgttgattaaattgtatcacatttttattaacattaacattattattagtattaatattgacattattaatattatcagttaaaatagtattttcactatttgaagaattatctaattgaatatctatatttgaatgagtttgacttaatagaggttttttaatttcaatttgagtatcttcaatttttgtctttggattgatattattattattaatattattaatttctaaatctaattcaatatctgaattatttaaagaattaacatcttgaagagaagaatttgcagaaggaatattattattatgagtagataaatttatattatgagataatgaatgattatttttaacattaattacaaccaaggaaggtcttctactttctgaagtgactatattatttgtattaatatgattttcaggatttgatgaatcatttgaattaaagacatttttaaaatgaggaggtctttctaaatcttgatcattatttgaattattaatatgattaagcatttttgtgaataatgtaatataatgtaatataatatattaatgaatgtaaatttgcaatgtaaatgtaaatgataaatcaaaagaaaggggtgtgtatgtctaaatggagaaaaaaggggggataaggataataatttataatagttttgtgaaattaaatgaagttagaataggataaagatgtgaatgtaaagtagtgaaaattcggataaaaaatgtcaaaggggtgtaattgataaaatgagtaaggatataagcctaaaaatgggaaaaaaaagtgaaaagtgaaagtgaaaataagaaatgaaaataagaaaagacaaaaaataacgttgcaaaggcaaaatttgagagaaaaagaaacgaataataacctgtgactaacctgaatcgtttctttttttcttacgtaatgtaatgtaatgaaatgaaataatagtagcttcgagaaatgcgagattttctttttcttttttctttttctttttctttttcttttttcttgggaaatttttcaaagtgcgggaaaattgtctttccttctatttcctcttagtaatgggtaactattgtgatttcactggatcagtatcaagatctgtattatttatattctggttacgtaattgtctgaatatgctgtatttatactatactatattgtatatagatatggatatagatacaatagatacaattgatacaattgacgctatgtaaaacaagaagagaaatgcaaataagctctgagaagaggaagaagaagaagggtgtaaataaaagggaaaacacagctgagccaattagttagttatacactaagaattacgctgagccttaatattattgtgttgagccttcttaatattacaaattattattatattatcatcaattatcaattatctattatcaattatcaattatctattatcaattatctattatctattatctatgattatatactctacttcactttaataactcactccatgtaatctcttttctaactgcattactgaaaccttcatgatatttaacccatatcctctcttctttactctctttacctttaccttctcctttattatctttcttatctcctccaaaattattatattccctttgaaaatcaacactatccttattccttaaatatcccatccccaatcttatgtcttttattactattataattatcaccttcaccaccttcttcaatctctctatccctctctctctccctttcaatctcaatattcatctttctcattctttgttccattattccatttataatttctaaatatggtttactaataacttcaagtttcttaatttgccatctttcattaatatcttcaactttactatcattaactttatcaatatcaattaatccttcaattatatctggtttcatccttatattacctccattattaccattattattattattattaaatatattattcttttcaatctttatctcaaattgtttcattatctcaattattctatcaattttaaccctctctttatcaaattctttaccactattaatactgctattattattattacttatattatcactttcactattattattattaattaataatcgtctcttttcataattcggtattaatatagaatttaacatagatatctcactatttaccataacactatgatttatcttaccttgatatttcttaatcatattgttaattaatgaattaacattccttttaacatcaaaattttcttcactcttgaattgatatttaaatttattattattattattattaaaaccaatcataccaccaccattactattaaagttagaaaattgttgaaaatattttaatgaaacaattgagttataagtattactctcatcttgtgtcattttttgattatttaaattaatcaaatcttgaaaataattccattctgatattttatcaagtttatttaaatcatcctcatattcctcatgaacttgtaataatagattgaaacatcccatattaattttatttaaattattattactcttatttaacttttcccttaatttattgaaaatttcattcttaccaatcttattattagtaaatttattctctaaattgaaaatttctttaataattttaaaccatattatatcaccatccttaattctattattatttaaatctttactattaaattgtaaaaaattaatacaattacgtatatcaccatctaatgaaataattaaatcatctaataatgattcattaacatcttcaatattttcaacttttaaaatttcctttaaccttttcttaatatgtttttcattacttttctgaaaattaataatttcacaaaatggttttaattgttctaaacaattagatccaatatcattacacattgcaattattggtctcttaattaaatcatccattttattatattttaatttaccaaaattatttaattcatcaacaacttttttatccttttgtaataaattaactaatattttaattataccattctcactacccattgctccatcaatttcatctaatactaaacaaatatttttacctgttaaactcctcatttttaaagaatttttaactttctctctaacattaacacctgatctatcatcacttgaattaatttcttgaatctcaaaatttaattgtttacaaacacattgtgcaattgttgttttaccaatacctggaggtccatgaattaaaatcattttcttacgtggtcttttaaatggatcattattataattattatcattattattattaatatcattaagtctaatcttacctccattaactatatacatccattcatttaaccatttaagaatattagcattaactctttcattacctaaaagatcaataaatttctttggtctatatttttcagtccataaagtattttgatttttctttctatgtttcttattattcttacttgttaacatttttaattcattaatatttttctttaattcatcttcattttcatttaatttacttaattccttttcagtattttccttaatccttattttctcatataattcattcatatttaaacattctaattgtttactaccattaattaaatcattaacaatatcacgttccttatttaacattaaaatatttttcggcttaattgtaattctttcaccattagataatgtaaatttcctatcataaataaccgtaggaagttatttaataatacatttttcttctccttgtttaataaggaatgcaacacattaggatgcttcacttgtacctattgaaaaatccattactttccaaaagaagtctttggatgtatataatcgttcaaatttcaatttcacactataacaattacgcgtcaacattggaaaataatttatttaaatgtacacgaattacatagtaaaagtagagtaaatatagtaataattacaaattgtaaacttagaaacagaagacttgatcatcttgttttgattgtaagacacctttttcccatcctaattcttctaagtattgtaacattacctttttcatatctaatggaccacaaatgaaaatttttgtatcattattaacagttggtaattctttttctagaatatcctttgtaatataaccagtataaccatcttcccaatcctttggtggataagttaaagcatatttaatatcaaaatttggataagatttaacatattcatctaattcatcctttaataaaatatcattttcagtttcatttgcaaataataatttaacattagtagtatcttcaggtgttgtaattatattacctaaaactgataacattggagtaatacctgaaccacctgcaatcattataatatctttttgccatatttggtttatatgacattctaccaactggacctttaaataatacttttttaccaggtgttaaggaagcaaaatatttagaaactttaccatctttataagatttaacaattatatcgaaaaatccttcatcaaatttatttgaaattggtgtataatatctaatttcatcattatcattaatattaactttacaaactaaatgatgaccaattggtatatttaatttatcataatcatgatctaatttaaatctataaattgcagaatttttagaaataattgttttatcaattaattcatattcttgaaatttatcctttgataaaacaggtctttgaattttaactcttaaaatattaaaacctaaaaataatgctaaaattaaaaccatataaggtaaataatcataatttaaaattgaaataccgaataaacataagaatgttggaatatagattccatgtaatggtagtcttaagtaaatctgctccttcaagtttagccattgtactgtattctggagagataaacaagaaagaagacaaaagtagaaggatgaaaagatgttgattaataatgaatctacagtataataataatacaaacagaatgcaaaaaattattttcattacgtaatattgtacatgttttgttatgtaacttataacttaacttaccaacagtaaatgaatggtttttttattacttattaattaaatgaaatgaaatatataagagtaaagcaagtaaattaaaaataaactaaactaaaattaaatgaacgaattgagaatgtaatgttatattaggaaataaatcatttattcagctgaacttgtatctggaacttctttaacaatttccttttccattgcagccttttcagcttcttgctttgcctttaaaattgctgtccaaccatatttagaattttttcttaatctttcaccataaattgagaaaatccaaggaactggaaccataactaatgcaataaatgcgaaaactgtaaccccccaataaatatgtaatttatgcatcatttgaactgtaaataatgggaaaactgatgaaacaacataacgtgtaacattatttgcagctaatgcagaagcaacagaaattggtggataagccattgaaaaataagttaaaattgaaaagaaaattaaaactaatgaaaatccaaataaaacacctgatgcagttggtgccatccaatgaacactagttcttgcagtccaagctaaccaaaataatgatggtccaaaagttaatgaaccaactttacaaggtaataatcttgattcaggagttggaggaattttattaccatctttatccttcataccaatataaccatcatcccattttttaaagaaaataaatttatccatacaaacatagagtgatgcacctaacagtaaacctaaaccgacacctaaaaatggtaaacctgaaacacctgttctcatttcatagataccaacgaaaataattgggaaagcttcaaagaaaccgaataaaactgcgaaaacgaatgctgtataaattgagaaaactaaaacaattggttcaactactaacatttccattggttttgctaaagtcacaattaaaacttgatgtcataaattcagacaatgataatgtttgtctaatttttttacctcttttaattaaacgtcttctcataataattggtttataagtttcaggcattaaaaataaaggaccgaaaacagcagctgcaaagaataaattaacccacattgcccatttaagagaaccgacatgatttggattatctgaagttaaattttgaccaataaaaccaccaataattggaccaataacaggaccagctaatggagctaaacaaaataaagtcattgcaataccaatttcttgaggtttccaaacatcagtaattgtaccaccagcaattgctaaagcacctgaagatgttaaacctgcaaagaatcttaaaactaaaacatttctaattttatttgataaaccaacacccataatgaataacattgaaacaggtaaacttgaacaataaacgatttttctaccgaataattcctgacagaggagcagcaattgttggaccaaatgctaaacctaataaataaaaggttaaacctgctaaacctaaagtttgactaatatgccatttaaccatcatttcaggaattgaatcaacataaattgatgaaccaagagtaataactaaacaaagaaaagcagttgacattgtacaataccattttcttaaaggactccaattaaatggattatcaggatcatcaggagaatcccaatcaacttgtcttggatcataaccaataatttcaggatcttcagaatctaataattgagattgtttctctaaatcagtattatgagttaaaactttactcattttagaaattgaagttgcagtacgttctaattctaattctaattcatcattatattcatcatttggattttccaatgttttcttttcaaaatcttcagcatttgtaaatgaagtatgagatttaacagtaattgttctttgtaaatcattatgttcatcagctggagttggagatgatggaatataaggttgagtttgagaatcagtatcaatatctttatcaccaatattatcaatatcatcattatcaattgtatgattaatatcaatatcattattatcatctatagcatcatcaaaagattcaacagccgattcatatcttgaatttgaagattctgaattccttgaagacatcttgaattctttggtattacttaattccaaaaagaagggtaataatgaggaattattaattatcaataactgaagtaaaagaaaggacctgatattagggatgtcagaatataaaagataaacattggcaaaaatttattattcaatatgtcctcggagaaattatagtgatgaaattttcaaattgtttaggtgtctcggcaatttttcggtgagtaagtttttctaattgtgttttgttttatattattttgttttgttttgttttcggtgtattgttttaccaacatataatttaagatggtggttacaataagtagagtggtaaatattactaagggataatagaatgcattcaattgtaattgaagactactagtaactaatagtaactaatataaaacaatactactagtggaattgtcggcaaaaccgataataataataataataaaaataataatagtattgataaattgataaaagctattgtttaagcctcgtttaagagaaaactaatagaaaaagaaaaaaatataataataacaataattacgtaacagtcacgtgacagacgcgtctattaagtaaatgatttaattatgtaatagtgtgcgctattaatgaagagaattaaccaatttcacgttttttcagagttcttaaaaatgcacatcattaaggacttaagaccctttcttttatttaagatctgaagtataccttatcatcattatattataagatcaattaattaaacaaagataataaagataatatggttagtgcagttgatttaattaaacaaaataaatatttaatgttatcaaaatcatggtgtccagattgtcattatgcaattagagttttccaaaaatataatgtaattaataaagttaaattaattgaattagataaaatgaatagtaatgaagcattaaaattagagaaagaatttactgaaatttcaggtagaaaatgggttccatcattattctttaatggtaaattttggggtaatgaaagtgatttatataaattagagagtactgattcaactgagaaagttttcaaagaagttggtttattataataattataattataattataataatactaagattatgtaatgtatttaaataaatgattatgtaatactctataataataataataataatagactttaacaataagaaaactattcccaaaagggaaagcgggggtgtaataaaagcaataataataagccttttgagggggtgaattattaatactcaatatacttaggataataatgttcataatccgataatcggtgatgtagttagttataacagtaataataactccatacacggagaaaagattattactataataatgttataaccattacataactataacaaaccctatcctccaatccgtgttaaatactccacgaagagtagtcaaaattaaagagggactccgagtactactatccacaacaagtggcagttaactccgatattaagaaaatttttatttcaatgacataatactaagtaattgagatgttcttttactcttttatcgataatgcacaaccccactactactccgccctagggggttaatttagtttttcaattttgttcgttttatgttattatagctgttcatttcaattactaattgtctataaatacaactgacacccccccaattaatcaatttgtataacttatcttaatcttatttatctcttttatattcctttcttgtagtttcttcttcttttatcaatcaagaagtacttctgtaaaaaaaaatgttaagaactactacaactaaagttaatttattaaaatctttctcagtttattcatcttctgctgcaagattttattcatctttaccattatctcaaacaattactttaccaactggtcaaacttatgaacaacctgttggtttattcattaatggtgaatttgttaaatctcaacaacataaaacttttgaagttttaaatccttcaactgaagaagaaatttgtcatgtctatgaagcaagagaagatgatgttaatttagctgttgatgcagctcataaagctttccatagtgaatggtctaaatgtgatcctgcaattagaggtaaatatttaagtaatttagctgatttaatggaagctaaataaagatactttagctgcaattgaatcaatggataatggtaaagctttatcaatggctcaaggtgatgttggtttagttattaattatttaagatattgtgcaggttatgctgataaattatatggtaaattagttgatactggttctaattattttaattatgttaaaagagaaccaattggtgtttgtggtcaaattattccttggaatttcccattattaatgtggtcatggaaaattggtcctgccttagctgctggtaataccgttgtcttaaaaactgctgaatcaaccccattatctgctctttatgctgctaaattagttaaagaagctggtattccaaatggtgttgttaatattgtttcaggttttggtaaaattactggtgaagcaatttcaatgcatccaaaaattaaaaaattagcctttactggttcaactgcaactggtaaacatattatgaaagctgcagcagattctaatttaaagaaagttacattagaattaggtggtaaatcaccaaatattgttttcaatgatgcagatgttaaaaaagctgttcaaaacttaattgttggtattttctataattctggtgaagtttgttgtgcaggttcaagagttttcattcaagaaggtatttatgatgaagttctggaagaatttaaaaaagctgcagaacatttaaaagttggtgatccatttgaagatggtgttttccaaggtgctcagacttctcaacaacaattatctaaaattttatcatatgttgaatcaggtaaaactgaaggtgcaactttagttgcaggtggtgaaagattaggtaataaaggttatttcgttaaaccaacaattttcgctgatgttacaccaaagatgaagatttattcagaagaaattttcggtccatttgcagttgttactaaatttaagactgcagatgaagcaattgaaatggcaaatgattcagaatatggtttagcagcaggtattcatactaaatcattagatactgctacttatgttgcaaataaattagaagcaggtactgtttgggttaatacttataatgatttccattctaatatgccatttggtggttttaaacaatcaggtattggtagagaaatgggtgaagcagcatttgaaaactatactcaatggaaaactgttagaattgcagttaatgatggtcctcaataaattatataattttattcaaatttattcttattctattctatttaacttgaaaatgaaaacccgtgtataacttactattattttacttattaacaactaatgaagcttatgaaatgataataattattataattataatcatagtaaatattacgtaatactccaaacacggctcaaactaccgcttttgttttgttttgatttcgaagcgcgaaatgtaaacattggaaagaaatttttattgtgaagcttttcgatgtgtttgatctggaggtaaacaaacgtatcattatattatatttgtgtttgcaaattgtaattgtaatttatatctgtattgctctttagtatccaactttgaatgagtgaagatacagtcccaataacattcgtctccgattgttatggatagagtgttttcaagttcaactttaacttctaatatgtcattctcagatgatcaaaatgataatgatcaaaatgattataatgataatgataatgacaatgactatactaatacatctttatcagatgatcaacttgatatgcaacaattattaaagaatttccaagataatgaaccaatatttgataatgaattattatatccaactccaaaagaatcaataattgttcattttaaagataatcaattaattactggtacagttgaatctttaataacttatatgacatcaccatttatacttaattatcaattcttaattgattttttcttaacttttagaagttatattgattcattaccacttttggaattattattatgtagattatcttggtgtttgaaaaaatctttaagtaatgatttaaatgaaatggaaattggtaaattagttttaattagaacttttgttacaattcgacattggttattaaatcattttcaagatgattttattaataatttaactttaagaacattatttgcaaatactattaatgaattaccaaaatataaagaatttattggtaatggtaatgaaatttcaaatttacaatcaaaaattattaaagatttaaagagaaaattatttaactttatcgaaaatttattggaattcaaaaattgataatgttgaagatattgatgatattttaaattataaattatcttcttatgaagattttgataattcaagattatcagttttaggtatttctcaattatatgatccttcaagtagaagaagtacacttttgaatatgttagaaaatccaaatattaataatagtcaaagtaatttattaaatgatacatcggacagagaaaatccattagaaaactatttgaagagacaaaatagacaaaataattcaagaatggaaagaaataatcataatcgtaataatagtagaaataataacaatcataataataataatgaaaatttgaattttatttccaaaagattcaattaatgcattagacttgaaaaaatttaaatcatcatcaacaacttttgatagttcaagcatcgatcaattatattcatcgataactgagagtaattctaaaaatggatttatttcattaaataaacataaatctgggtcattaaatttgaatggattttccataagtggtaatattgaaattttcaatgatagtaaaataaataaaattgaatcattagttaatgaattacctaaaaggaaagttaataaacccatggaaaaagaatctgaacctgaacttgaaatgaagaaaaactaaagtggaaatcaaaactttgaataaatctaataaagttgcagatattaaggaaaatcaaaagaaaccaaaaaagaagggatttttgaaacaattattcacacataataacagtaaggatactaaggaaaataaagagaatgaacccttaattaaacgtaaagaaccaatccaacaaaaacctataattaaagggaataaatcacctaaaaagccagcaattagtgatatgattaaagatttagaggataaaattttaattaatgattccaaaattgattatttagaagaaattgtgataagggattataaaataatgatatcaaaaccaaattttagaaaacgttattcaaaacaaattaaaaattctaataggaaaagtatactttcaatgggatttgatttaactgataatgaatcaaaatttgatccaaatgattcaccaattaaaattaataaaaataaatattatgaaggacaacttgaaaattcaatgaatattagacaaataaatcaaaacacagttaacgaagaattttcaagagtaaataatgaaaatgaggttgaagaagaagaagaagaagaatataataatgatgagaatcatcaagatgatgtaaaatcttttcaaacacctcctaatacaaccaattggtcagattcaatgataatcaacgattcaactaatttaaatactaaaaatgaatttattgatatgggattaattaatagaaattcaacaaaatcattatcaagaccaaataccgaataccaatatcaggaaaagtttccataatttaccaagttctacaactatttcaacatcatcaaagagaaataaatataacagtgatccaaatttacttatgaaacagacaataattaaatctggttttataaatatacttaagtcaagtgttaataatacaaatataagcttatgaaagttttagttataattatgattcatattcattaggaactggagtatttgcgaacaatgttaataatttcaataatcaattaaatattacaggaaataataatattagtaataataattcaagtactgctcataatagtatgagatattcagttaatataattggtggtagaaatagtatagtttctaatagatcttatattacttatgattcagaatttagttcatcttcaaaagttttcaggaataacaataataatgaatttgataataaattacgtaagaaaggtgctgttttaaatttaaggaatgaaaatgatgatgttataaataataatttgaataatgatatcaatgatgatggttatgaagatgaagatatttccaataattatgataatgataatagttcaaatgatgagtctaatttggaaattgaatccaatataaatattgataatttaaaatatattcaagaattacctttctttgaaaataatattgaacaaaatcgtataatcaaaaaatctggaatatcaattttaccatcaccaactgcatcacaaacatgttataatgatttttcacaaaaagatataaacgaacttgccaatttaccagatgagaaaataaatgatgatccattaaattatacattaagtaaattaagaggtgataggaaacaaccaactgttataattggtttaaatgatgatgttaaattagatgaagcggaaattcataggaaacatgcagttgcagttgtttgtcaatcaccaacaaaaaagcaaccaataatgagtaatattaatgatacattacatgattattatcaatcatccgataatgatactaatgaagaaattatattagagaatcgaattaaagatttgtatatatctgctaatccaaatgatactgataataggagaccatcgttatgttcaaataataaattagaaatgaatatgatatcaacacaatcatttagtaaaatgagagataatggtagtatacatactaaagttagtacaggtaaattattaagaaatgatagtgaaagatcaatgtttgatatacaatcattatttgcaactcctaaaggattagataatattacaccattaattccaataactgatgttattaataatgaattacatataccatttattttcaaatatgattcagatatattggcaaagcaaatgacattaattgaacgtgatattgtatctgaagttgaatggaaagaattaattaacttaaaatggaatcaacctttaacaccatataattcatggttaaaattattagttgatatttctgataaatcaggattagaactaataacattaagatttaatttagttaataattggattatttctgaagttttattatgtaaaaatatcattttgagaattttaacaatcacaagattcattcaattagcaattaaatgtcgtgaatatcaaaattatggtacattatttcaaattatgttagcattaaattctgatgtaatgaaagaattaaaatcaacatggattagaattgatcctctgacaattttgaaattcaaagagttgaaagatttaacatcaccaattaataattttaaaaattatagagatgaaattgaaaaaattaaaccatcaaagggtttcataccatttttaccattatcattaagtgatctaacaatgtattctgaaatgccaacaataataagttctaataatgatgatttaagtacagaattagattcattagatggatttggatctgaatcagtaattaattatgaattagttaattttgaaaaatttacaattacaggagagacagttaagaagacattaagacatattgagtggtctaaattttataattttgagaaaaatgatgaagttatatctaaatgtttatacattagttcattaagtgaagaagatatggagaaatgtctaattgaaattggtgataataatgtgtaaattgtatagtaaataataatagaagatagaagatatcaatgttaaggaaaaccgttagaatttcaaatactcgccttattttttgtaaaaaatgtattgtacccagtggtgtcatatcgaagagctgtactgtacctgctgagcatcgattttagatcagtggtgatttgagtatttgattgtgataattaataccttgaatcaaattactaggacatcaattggagttgattgtattattagaaaaagtttttatttgtcagattggtgttttgtgtaaaattaagattaattagtatactaattacagcatatgaaatttgaaaagggaatacgttgttggataccggatccaacacttggttgggttggtgccaatgtagaaaaagtggaatacgatggtttaaccaaaaattataaattgaattagtttatgatgatgataatagtaaaaaaattaccatagaaacaaatgatttaacaggagaataataagaaaataccacagatgaggaatttagatgatacagttgatgatttaacaacattaccacatttgaatgaaccatcagttttaaattctgttaaattaaggtatcagaaaaggataatttatacattttcaggagttgttttagttgcaattaatccatttgaaagtataccagcatctttattcaaggagaagttgttttaaaatatcaaaataaggataagtcagagaatccaccacatgtttttgcaattgctgatgaagcttttaaattaatgaagaaaaatcaaactagtcaatcaattattgtttcaggtgaatcaggtgcaggtaaaactgtttcagctaaatatattatgagatattttgctaatgtaaataatgaaaagaattcatatgaaacaactgaaattgagaaacaaattttggcaactaatcctataatggaagcatttggtaatgcaaaaactataaggaatgataattcattcaagatttgggaaatatttaagaatatgctttgatgagaaatacgttcatttgtggagctgagataaaaacttatttacttgaacgcttcaagattagtgttcacagtcagaaggtgaaagaaattatcatattttttatcaaatgattaatggattgtcagatgaacaaaaggaagagttattattgaaagattgtgaagattatagttatttatataaagggaaaacttcaactgttaaagatgttgatgataagaaagaattcaaagagacatgtgatgctttgagagttattggagttgatgatgagagccaatttgaaatttttaaagtacttgcagctttacttcatatcgggaatatcaaaatagagaattcaagaaatgatgctgttttatcaacggatgaacctaatttattacttgcttgtaatctgttaggattaaactctcatgattttagtaaatggattgtcaaaaagaggatatcaaccagatctgataacattgcatctaatttgaaatatcatgaagctatagtagcaagagattcagtggccaaatacatctactcattgcttttcaattggttggtaagttatatcaatgctgatttagcctcttcaactgtcaatgaaggtttctttataggagttttagatatttatggatttgaacatttccaacataattcatttgaacaattctgtattaattatgctaatgagaaattacaacaagagtttacacatcatgtttttaagttacaacaagatgaatatgttaaggaagggattgaatggtcattcatcacatattctgacaatcaaccatgtataaatcttatagaatcaggtgaaggtatattatcattgttagatgaacaatgtaaattaccatcaggatctgatgaagcttgggctgagaaaatgtttcattctttgacaaaaccaccacacaataaagtgttcaagaaagctagatttggaaatgaaaaatttattgtttctcattatgcattagatgttaattatgaagttgaaggtttcctggagaagaatagagatagtgtttcagatgttcaaaatttgatccttaaatctacaaagaatgatttttttaaaaaaattcaagaagaatcagaaataaagagcccacctcaagataataaaagaggtttccaaaatagaaatagaaaaccaactcttggacatatctttaaactatctttgaataatttaatgaaaacaataaatagtacagacgctcattatatcagatgtattaaacctaatgaggaaaagaaaccttggcaatttgataatacaatggttttatctcaattacgtgcatgtggtgttttagaaaccatcagaatatcattagtaggttttccatctaaatatacatacgaagacttttttgcagagatttcatgttttgttgaattccgaagatttgaatgaatatcaaaaagcagatccaaataatcacgaagaacttaaaaaattaagcagcaagttactggttaatctaattgatgataaatcatcttttcaaatgggtatatccaaaatattttttagaagcggagtattgggtaaattagaaattgaaaaatctagtaagattcacgatgccgttgttgcaattcaaaagaattttagaacatatattgctagaaagagatatcttgaagcaaaagaatcggccattcaactccaatcagtgttacgtggtttcattgtccgtcaaaatatgaaaaatatgtttgagagtgcaatagttatacaatcattaataagaggtgtaactactagaaagttgtttaccaatattaggaaatcaattattgatattcaaagctatggccgtggatatattggcaggaatgaattcaatgagttaaaattggagttagaagcagagagattagaacaagagagattagaacaagagagattagaacaagaaagattagaacaagaaagattagaacaagaaagattagaacaagaaaagttagaacaagaaaggttagctgccgaaaaattagaggtagaaagagtaaactcagagagactaactgcagaaaaagcagaagctgaatcccaaagattgattcttaaaggaaaagaatcattagaaagtatttatgtaccccctgttcaggattctcaagaacttcataaacaaccagtatttactgaactataccccgaggatgatgatactgatgaggtacataaacacgtgttggagaatttgacaccacagaaatacacttatgaggaccttttaggaatgaagcctaaaaaagcagttgcttttatttccagattaattgtaaaaagaatccattcaatcaccagatagtgttgaatcatatcaaataaagaataaaggtcattatttttcagatatggagttaactatgaaaattcaatcgaatataaactctgatataactaccctaattaaacttttgaaacgtcaaagatatattagacccgaaatcgttgataggaacttcactgcaaagaacggttactaatagatcaggaatacatacactacaatgtactcattgacgaaaagaccacacatttagaaagaagttataaagccgcatatggtgacatgttaagttatatgaatgtcccctcaattgcagttgattgtgtttctggtttattattaagcaacctaaacctcccagagagagctcctgatgctccgcctcatcttggtgatgttttatttccagcaagacttgttgtatcaattttgagtgatttatgggcagttaaacctttcgatcaatctgttatgtttttggtgaagacaactgacattattaatgaaaagctcaattcaattgatgatcctagggaattgataaccactggtgcgttcctcttgaacaatgctaatgaaatcaggagttcatgttacctggttcagacacagtactatgattaacctaaatgttgaaaaaaggaaaagtaaagatagagatgatcatttaagaatgttgtcgataattcaacagatacttgtaacattctttgtggtaaaatgtatcaactatggattgagtcaatctttaaacaacttgaaatcaaaataactggtagcgtgagagaatataaatcattttcaaatgataaattaacaaatgataatacaagtttgattcaaattttagataatgtgtatttatctatggaagaaaattgttttgagaaagatgtccagacaaccattattcgtgcattattgcattatattgatgttacatattttaatgttattataacacacggaaactatttaaatttcgatgaagggaaattgataaaattaaaattatcaccggttataaaatggtgtaattcactagatatccctgatggacctgaaatgttgttaaacattttaactctttcacaacttctgatgttgaaacagttggggttaattaatgttgatgatattatgaataaaggcactcacttgaatagagaacaagttaaaagaattcttaatgatgccgattcatctgaaaaagcagtgaaagaatgtaatgattatacccttccttacaaaaaaactatctttgatgacgcatttgtcaatagtaatcaagatatcaatgattaatgtagttttgatagaaaaatatttttaagctatagaaaaaatatataaatgttttgcgttgtaaatattaatttagaaaagatactttatagtaaatgtttgcgttggttagaaaagccaatatttggcaactactgaagttatgataactattgtagagactgataccatttgtctcatacttttgcttcttgattcgtttgtttttttcaatttttcaattgtgtctaatttaagttcaaattctttcaatacatcatcatttgaatgcattactgattttactgtatcaattctagcagttaaatcattgaaattttcaaataacacatcttttctcaaatttttgaaatctgtatcttttttcaaacctaaagaattaatgtgatcatctaattcttcaatttgtgttatcatcattttttcaattttttcgatttctttatattgtttttcaacatttgaaagtattaatgagctttcattttcgatatattctattcttttttttattcctaattgaactgatctttgtaaattttgaaattcgtcaatgattttatatgagattagatgtgatttacaaacatatgaatcatttggttgtgatttatttgctgaatctttaactgcgctatttgaattgtctccagtactattgctataacgatgcatatgattatgtttatattgattctgtgaagctctacatgcagcttgcaataacccagctgatcttttatttttagaattcaaagatagtgttgatgttgagtatgcgtttggatcattacttgcaaaagctgagtttgtttgtgcagcagtaggaactagtggagttatttatcgagttgtatgagttttgtgaagtactttgagtggatattgttttaactaacggtgccaaaactgtcggtggtgcaagaactgtgggctggttgatgtgattaaattgaggtaattgattagacggaatgtttttacttaaattatattcgtcattagaattgcttgaagatagtggataacttactgaatttgatgcactatgcattcgtcctaattgaagaagcggttgacgtagaggaagttgatgagtgtggcgggcgagctgatactggtggttgtaaaagtgttgaattaggcattatttgattgatttaaattgcttttagctagtaaaaaagtatgatcgttatttgttgctaaatatctaccatttgttttatttggtgatgaatataaagaatttttggtgggtactaaatgattataagcattgatattagattgcggatttgataagtttatggaagatgtagaacgagaacttgatgtgaaagttggtaatttcagactagcagttgaagaatttgaagaatatgagtcagattgtttatgtgaagtaactattagtagaatcattattagctttagatattcttggcagtgtatatgaagaattcatgctatcattgaatttatatggggagtttgtaatgtagtttgaattatcatttgtatcatttatatcttgtaaagtttcaaattgctcgtcattattatcaagatttaaattattctgtacactagtaccatttgaaacaatcggaatcaagtggatgaagtggatcatcattatcattatcattatcatcattatcattgattacttgatcaagttgattcatttcatctattccaccatttttatcgagattatagtctaatgaatcatcggaagtgaaaggaaatgcaattttagaaagtctctttttaattcttgatttctttgaaagatttgagttggtaactggattaattggagaaaaatgtatatttaattcattcttaataccattatctggatcatattgatcatgaacattattttccaccactgtacctgccttacgggtcaacattgctctggaaaggttgttaaaaggcaagattaaattgttactgtttcaattctatatattcaatcagcagttcttcatcggaaaagttaaattcatgccggctgattacgtaaaaaacggtttaagccaccattttccaaaaaagccaaaaagacgcgactatccacaaggaaaaattgaaaaaaataataaaatacgaaacgcgaaaacttactctactagagtaaaataaaataaaataaaataaatctgcgaaaagaaaaatggtgaaacttgccataattgttttgatttgatttgattttggtgatttttctcactttgagggggggggcaacttcattgactcgattttttactagtgtttttcagatcggtttcatttctggctcagatcttctgattttttaacttttatttacatttgtatttagatctattcatcaaaaaaagttatcttcttcaaatatgtctactgtacaacttgatgaaggaaggtatgtatacattttcatcaattaattattattattattattattatacgatacattcataaacaaaaatactaacacgtttcatattacagcttatgttggattcctgatcctgaattgggttggcttgccgtaaaggttaactcaattaaagaaactgatgggaaatattccattgaattatcccctgataatgatcctgaaaagattattacaattacaactgataacttagatgaatcaaattctgatttacctttaatgagaaatcatgcagaaaatgtcgaagatttaacaactctgtctcatcttaatgaaccttctgttttaaatgtaattaaattaagatactctcaatttaatatctatacttattcaggtattgttttaattgctgttaatccatttcaaagaaatgatgaattatattcaaattttagaattaaaagatatgctaatacaagaagaggtgaggaagaacctcatttatttgcaattgcagaagaagcttatagatgtatgattaatagaaaggaaaatcaatctattgttgtttctggtgaatctggtgctggtaaaactgtttcagctaaatatattatgagatattttgcaactgtagattctgatgaaaatcatcatgatatgtctcaaactgaaaagcaaattttagctacaaatccaattatggaatcttttggtaatgcgaaaacaactagaaatgataattcttcaagatttggtaaatatcttgaaattttatttgatgataaaacaactatttgtggtgctaaaattagaacttatttattagaacgttcaagattggtatttcaacctaaaactgaaagaaattatcatattttctatcaaatgattcaaggtttagatgatgatactaaaaaatcattctatttaactaatgtagaagatttccactatttaaatcaaggtggttcaccaataattgatggtgttgatgataaaaaagaatttgaagatacacgtaatgctttatcattaattggtattactgatgaaaaacaattagaaattttcaaaattcttgcaggtttacttcatttaggtaatattgacattccaaaaactagaaataatgcaaagtttatcatcagatgaaccaaatttagttaaagcttgtgaacttttaggtttagatccagttaattttgctaaatggactgttaagaagcaaattaaaacacgttttgaaactattaatactgatttaaaatataatgaagcaattaatgcaaaggatgcagttgctaaatttatttaccataacttatttgattggttagttgaatatgttaattcagatttatgtccttctgatattgaaagtaaaatatcgacatttattggtgtgttggatatttatggttttgaacattttgaaaaaaattcatttgaacaattctgtattaattatgcaaatgaaaaattacaacaagaatttactcagcacgttttcaaattagaacaagaactgtatgttgaagaagaaattgaatggtcatttatagagtttgctgataatcaaccatgtattgatgttattgaaaaaagactgggtatcttagatttattaaatgaagaatcaagattaccttctggttctgatcaacaatgggctgataaattatatgataatttggctaaacctccatccaataaagttttcaaaaagccaagatttggtaataataaattattatttctcattatgcattggatgttccttatgatactgaaggatttgtggaaaagaatagagataccgtttctgatggacaaaaggaaactttaaagcaatctactaatgaattcttaattgaaatcttaaatgttaatgaaaaacaagcaagtgaggaagaagcaagtaaaacagtaaaaccaggaaggaaagtaccagggaaaagtaactttgggatctaaattcaagggttcattgattgaattgatgaaaactattaattcaagtaatgttcattatattagatgtattaaacctaatgaagaaaagaaagcttgggaatttgatccaaatatggttttatctcaattaagagcttgtggtgttttagaaactattaaaatttcatgtgctggtttcccatctaaaatgacataccctgaatttgccgaatcttttaatgtattgtttgattcaaatgatcgatctaacttattaagaagtagaaatttggatgttgaaaatctaaaggtattgacaaagaaatttttggatgatacaataaaagatgatcatagttaccaaattggtaaaaatagagttttctttaaagctggtattcttggtaatattgaaaaaatgaagagtgataaacataaagaatctgccattgtcattcaaaagtatttaagaggatatcctgcaagaaagatgttcaaagaaacaaaagaatctgttattaaattacaatcaagtattagaggttatttagtaagattgagaattcaacaagaaaaagaaagagaaagtgcaattcaacttcaatctttgtttagaggatttttagtaagaaataagtgtgaacaatcaatcaaatgtattattcaattacaatcacttgctagaggtttaactttaagaaataatattttcaaagatacaatgaataaaaattctataataattcaatctggtgttagaagatatattgccagaaaagaactcaatagagtcagaaaaagtgctattgttattcaatgtggtattcgtaagaaacttgctaaagaatattttgataaactaaaggtagaagcaaaatctttaaataagatgcaagaagttcaatatggtttggaaaataaagttattgaactaactcaatcattaggtcgtaagatcgaagataataataagttagttgaagaaattgaacaattacaaaaattagttgaaaagactcaaaaagaacatgaaattatacaatctaaatctattgaaaatgatgaatcccatcttactcaagttggtgaatatgaaaacagtatcaatgaattaaataaagaaattgaacttattagaagtgaatatgagcaagctaaagacaaaattgaaactttaactgccagccaagaaaaattgaaggaagatttaaagatcaatttagaagaattaaagaaagctcaagaagatttaatttctagtaatgacgagaaagaattattagttcatactgttgataaattgaaattagaattaaaggatcttcaagaacatatgagtaaggctaaattcaatagcagtgcaatgattggagcaggtgtaggagccgcagcagctggtattgcatcagcagctggtagtgcaggaaatgcaattaatggacctgcactatcattcaatgaaaaaagtgtcaatagtgatagccttaatagtaatggtaattatgatgaagataattatgaggataatgatgatacaaaggaactggaaaatattaatgatgaattattgaaattattgagtaattccgatttaattcatagagaaatcatcgatggtttatttaaagggttgatattaccatcaatttcaaataatcctactgaaaaggaagttttattcccatcaagaattattattattatattaagtgatatgtggagattaggattaactaatcaaagtgagaatttctttggagaaattttagcaacaattcaaaagcttgttagtgaattagttgatagtgatatcataacatatggtacattctggatgattaatacacatgaattatattcatttgtttcatatgcacaaaatacagtttctagtaataaagaagttgctaaagtaatgggacaagaagaatatgaaattttcttgaaattaattgcagatgcaaaggaagattttgaaagtttatcatataatatttataatatttggatgaaaaagatattaggtatattagaaactaagagtgttcaagcagttgttttaagtcaatcattaccaggatttgtatcacaagaacaatcaccattaatgagtaagttattcagtaaagaaccaaaatataagatggatgacatattaacattatttaatgaaatctattggtcaatgaagaattgcttttttgatgaaactattataaatactgttattagagaattattgaaatttattgatgcattctgttttaatgatttaatcatgagaagacaatttttaacttggaagagaggtttacaattaaactataatgttatgagattagaggaatggtgtaaaacacatggaattgaggatggtaatgttcaattaacacatttatttcaagttagtaaattgttacaattacgtaaaaattctagtgaagatgttgaaataatttatgaaatttgtaattcattaagaccaattcaaattcaaaaattattttcactgtatcatattgcagattatgaggtaccaatatcatcaaagataatagatgaattaacacatagggttaaaacaagtggagatactgaatatttagaaactgttaataaggatacattatttgatgatccatttagaatgattgatttaagaccatttaataaaattgaagcatatgttccagctagattaacattgccaaatattcgtcgtattattgaattaagtacattaaatgcaacatatcaacaacaacaaatggaataaatcaaattaaattagtacatattttattctttgtatttgtaaataattaaattatataagataataaaacaaacaagcatataaactataattaaactataacgatattaatgatattaatgatattaatgatattaataattgatgataataatgaactataaacataaaatctactttattttcattaattactgaaatgaacagcaattggtacaacaaccactattataataattataataataagggcaacacataattttaattttaaattctttttccacatatcttttctaacttgatttgcagatttattaaataaggaagcattattttgtaatgaataagctctattatctatatcatctaaaacttcaccacgttggttaattgcttcaatattatctctcatcataccagcagtatcatctaaagttgattgtaaattttgtaattttgatgaaggatttgcatttgttgtattattattttgattatgattaaaaggagatgatgattgattagctaattcagcagcagcatcatcatcaaaaggattatatggatcataagcttgagctgaggacattgttatataatgaagtgtgtgtatgtattagataaggtatgttatacaagatttaactatttatatcaaacatcatcctggagttgtaagggagcttagtattaaattgatggtttcaggcgtggaaaatcaaaaattttaagtttttgttactattattattgttgttattgttttctgttttaaggactaggctttgacttagtacagtaagaatatattatagattatagattatagattatagattattagatgacgagtgttattaagttacggagtggatggcatgttgatcaagccattgtacgagaggaggagagaatagtttgtataagatttggagtggatggagagagagagaccttattaatagattcaatattagagaagataagtataagtgtaagtcaatggtgtgcaatatacagtgtagatattagtaaagttgttgatttcaatgatatgtatgaattagaggtagatgaatgtgtacttatgatattctatcggaaccgtcacgtgatggtggacattggcagtggggacaacaacaaaattggtgtcgtgaaaatagaatggtcacgtgacgcgttgattgaattattggagaaagtttatagaggcgcaaggaagggtcaaggtcttgttactgtttaggtgatggatgtctttgatgttgattcattttaaacaatggcgtctaatgaattaccatcctcatttgaggatccactagaggatttatcagttttagagaaattagtttatagaagtaaacaacaaccattagttccattaggttgtttagcaacaaccattgcagttgcaatggcagctaaaggtgttagaactggtaatacaaaatctgctcaaacttggtttcgttggagagttggattacaaggtttcacacttttagcattagttttcggttcaatttattatgataaaacttttactcaacaaaagaaaactgatgaagaattagcacttgaaaaggcaaaattaagggaaaaattatggattgaagaattagagagaagagataatgaaatgaaggatagacaaagaagagctcaattagcaagagagaatatgaataatatcaacaattctaataataatgataaataatgatttatgaacatgaatatataagctatatataatataagtaaccgaatgattcaaactatatactattactcttttaattctttcttttgtttacgtataaatctaacatcatcaggactaaaaccaccttctttactaccaaaatatgcccattttggagttttagcaatataatccatttcattaaattctttaccagattttaataattggaaaaacttttcataatcaatatgagtataccattcaccattaattaagaatttttcatttgcaataaggaaacaacatgaatgtgaatgttctgcacttataccataatttaatccacgtctatttaattcttcatttaatttattaacaaatttaacacattcttcataaaatggtatattttgcattgttaatggattaccattaccatcactactaccacaaaatgttgcacctttaatttcaattaatgatggtaaacctctttcaactaaatctgcataaccttgaatttcattcatattaaaacctttaactaatgttaatctgaaaactgttctttgatttttttgaattgttcttaaaatatctaaacattcttccattctttcccaaaaatctctaaataatggtctatcaacaatttttaattcatttttactacccgcatcaatactaacatataattgtgtaacttttgataatgtacgtaattgatcaggatgttgtgcattacaaactaaaaatgatgaaatttcttcatcatgtaacatttccaaaaattcattaatataaggataaaaaattggttcaccaactaatgataatgcacaatgacgaactttaaatgcttcatcaaatcttttacttataacacctggaacacctctcatttgtttaattttagaataatgtccttctaatgcaccttttaaaattaattcaggtttatcaacttcccatctccatgttgtaccaacaggatttgtaccatgtctccaacagaaaacacatttattagaacatgataatgcaggagttgtttccatacatctatgagaattaataccataaaatgcatatttataacaaaatcctctacctcttaaagctgcctttgtccatctacaaattttaacacctgaatgtgatccaacaactgtataaccttgctttgttaatgatttataagttggagaatcttttgcaaccatttgctttttctctaatccattatcatctggaagttcatcacttttatttaaatcttccatttcccatgtatcagtatctttatcactactattactttcagtcatcttcctcgtcatcatcatcgtcatcttcttcaaataggaaaggttcattatcattgaaaacatcaatcattctattaatccaaccatcagcaacatttttaaaatcttttttaacacaaattttacctaatgggaacattcttctaccacctaatttactaattaaattatcagcaattgaagcttgacaacaaaattccttttcaccaccccaactctctgaatcacctaaaccaacaactgtaaatccagttaatgaatttaaagggaatttatcaattctaaaatcattatttgtttcatttaaaaattctaagaaataatcaattggactatcagtttcataagaaggtaaaactaaaatataacgaggattaccatttggaattttaataaaataatcatcaagatcatcaatatcatcatcaatacttaaaattttaatttctaattcattatttgaaattttaaattgattgaaaatttgttgagctatacgttttgaagtaccagttaatgatgaataaaaaatataaattggagtatttggagttgaaacagtataaatatcaccagtacgctttttacttaatttcttaacatttggagcaatgattttacgtactttacgttttctaactgtagtaatattattattatcattattattattattattattattaattgatttaaaaaatggagaataaattaaagatattaataatatggggaaaaataaagaaaatttcccataaattgatatcaggaacaatacagccaatgatactgttatggattcactattcattattgtatagtgatgaaatatgtgatgcaaagaacgtaaatttccaaatataatatttccaaattaaatttccagattgaaaaattaaaaaaaaatttaaattttcatgtaaataaatctaagagaccagttaccttgattgaaaaagaaataatccatgttacgtaatcaaatggaaattgattaatttaatttctatgatgtcacacatgataatattttaagctttggtgcacatgtacataacatgagaagattgaagattgggaattgattgtagattggggataatgttataccctctttcttttgctttttgcctttaatcatcaattatatcacacagttatacccccattttaccccctaattacactaaacttattacatcatcttatattaaatctatttatctagagaatctaaattatacccagttttatattattattatttgtttatttatttattcattcatttcatttcattaattatacctttccatttccatttccatttcgttcccgttcccattctcattccctttctcttttaaattgaaatattaaaatgcctttatttaggagagattcatcaaaacgttcaaattcttcacctgttagatctccaaatttaaatccttcatcaaataattcttcaattttaccaacggaatcatcaaattcaattacaagttcaattgataataatgatgaaaaatctgaatttagaagaaatcatcgaagtagttcagtatctcaaaaattgaaaaatttatttattggtgatcataatgatcatattgaaaatattactaataataataataatgataataataataccaccactaataatattgatgatacaggctgaaaattcacttaaaggatcgttatcaaataaaaaatcatcattaccgatacctaatagaacaattggtcgtaataatgttacatcacattcaatgcaattgaaaaataaagaaatgtttgatcaacataataataataatataatgatgaacctaattctttcaaacctaacactaacacagcaaatataaatacaaataataataataataataataataataataataataataataataatattcatattgaacaaccaaaatcttctcgtataagatcatcaactgtttcagctcatggtaattatatgcacgatcaattacctgttttacatcatactgaaaccgttaattatagttcaactcatttgaaaaatgaaagagatttaacaattaaattaaatacaagattaagcttatttgataatggtaaattacatgaacatgatttttcaaaatataaaactcatccttgtaaaccaactgtcggattatttaattggatgaaaaagaaagaaagtatcaaaggtgatttagattctcaatcaaattaccaattaattgaaaaatcaattagtttattacctgataaatattcaggtaatttaatgagaattaaaaataatccaaaaaattatatttggaattatgatgatgatgatgatgaagaagaggaagatgattttgataatactgaatatgatactgaaaatgatacgaatgatgatgatgatattgaggataaaccaagacctaatctgaccaggaaaatgagtatggcaagtgtttatagttcaagaagtactaaaagtagacaatctaatagaattacaaaacattataatagtgatgatgaatatgagaatgaaaatgattatgtaaaagatatggcaggtgttgattcttctgatgatgaaaaggaagaaaatttaagacctgatataacaaagaaaagacatgttagtacatcatctgaggaagttacaagtgaagaagaagatgatgatgatgaagatgacgatgacgacgacgatgatgatgattttgatgatgagattgataatataatgattgaaccaattattggtaaagaacaagttttcctcatcaatagtatgttaaacaaaattgaaaatcctgaaaagtttaaaaataaattaaaggagaaaaagcaagaaggtaaaattaaacttacattagctcaaaaatatggtcatattgaaggtgttattggtaaaggttcatatggtactgtttgtatttcttctaaaactgttaataatactaaaattttctttgcaattaaacaacttaaaagaaaacaaggtgaaactttacatcattttggtaatagagttacaagtgaatttatgatttcttcaagtttaacacatcaagcagttattaatgtttatgatttaatgtttgatccagtttcaatgacttatagtgaaattatggaatttataccatgtggtgatttattttcattaatttcagtaactcatggtttagatattgttgaatgtgattgtttctttaaacaaattttaaatgcaatcacttatttacattcagttggagtttctcataatgatttaaaaattgaaaatttattattaacaaggaaaggtcaattgaaaattattgattttggtacatcagcagttttcaaaactgcttgggaaaatgatattcaattatcattaggtgcatgtggtagtgaaagatatgttgcacctgaacaatatattaaaaatcgtgaatatgatccaagattaggtgatgtttggtcattaggtataatttatttaacaatgtattatggtaaatattcatgggaatctgctaaatcaaatgatgaacattatgtaaaatttgttgattcaagggcaaattatgattattcaatgaaaagtactttaagacctcatcaattcaaattaagtaaaattggtacttattcagcaattgaaaatattaaaggtggtattgaacaaagttggagattaaaatgtggcaataataatattagtggtgatacaaataatattgaattaattaatgattcaagaaaatatgttttatataatatattaaatcctgatccaaattttagaatgagaacttatcaaatttggcaaagtgaatggattaaaagttttacagtttgtgatgcaggtagaggttatgttagttatgataattatattgaaatggcaatgaagagtgcacaagatgttgaagaaaaagaaaaggagagagatagagataataaagatacttctaaagataatgaaataattaatcataaatctaatgaagatatgaaagataaattagaaagaaaagaatctaaaaaaagttatggattcttaaatttaggtaaaatcaacaagaattaatgattttttttataatgattaattttaatactataaagaatgtgtattataatttttgtgtaattaataattaataataatgacaatttatgataataaattttattaaccaactacattaaaagagattaacaaactaaataatttcttccttttttttataaaatatttaaattttagaaaaatattgataaactaaatttagttaacaaagtagtgtgggaattccttgaagttgttttctaaagaacctttcatggaaacgaatttaacataagcaccatcttccttaacttcattgttttgtctctttgcaacatattcatctctgtttaagttggtgaaaccccatttctttgagataataattctttgttgacctgggaatttatatctagatcttcttaaaccttcaataacaacagctttgttagaatctttagttctaattgaaattaaaacttgaccgatagtaactctagcagcacaaccatgtggtttaccccaagcacctctcataccttgttgtaatctatccgcaccagcacaagacaacatcttgttgattcttaaaatgtggaatggatgaactctaactctcatatggaaagattctctaccagattgaacggtaatatatttgtttgcacaaatacgtgcagcttctaaagcttctgatgataattgttcaatttcgttagaaactaaatgaacacataatgggaaatcatcaacggatgccttctttctacctaaatcgaaaaattctaattttagaatctgggacacctctgttatatctggattttgggtaaggcttgttcttacagtatctgtaacatcttgctggtcttctagccattttgattgattatctataataaaatattataataagatatgttagtatttgttaaaacaatttgaaagggaaaagagagatgtgatagaaaagtagaattaattttatagtgaaagtttcaaaatgtgaaaaaaaatctgattactaatgtataggaaatttgattttcttctctaaaaatgtggtgttttgagtcatgtatttaataattgaatgatgtccaacactgtggtgttttacctaatgatgtatcctgtttatatgtttatctgatcttcatgttttaattaactttgtctaatatttaacatttcatataaataatcttaaaatatatcctacttttcaataccactgacactggtttaatctttagttcttagtcttccatctatgacatgtatatgaattaagggtacgtacctgtttggttattagatggattccaaggacaaaatacttaaaaatttaataaaattcactaataacaattaaaattctacaaaactaaagtaaaaattcaaataacagtaaagtgtacaatcaatcaatgcaactgaaaaaaaatatgaattttaactaacttttccccagtggaagtattttttgcccatcagttttttcagtccccgccccttttggggaaatttagctactactacttacttactaatcaattattcgcacagtactaaatttttgtgcaatgcgccatttaacagtcactttttaaagtatgtatttttcttttttggttttgtgtctggtgcgagtgtgcatgctgaagggtttgatttaagagtatgcccttttgccaatcacgtgtgtggcgcatgatgatttattataaatttgtatttgcggctagtgttggaacataatctaatctttaatgaaaaaaaaaaaatattctgaaaaaattttaaatcattaaattaatcattggtaaatttgattttatataaattaacatcagttcttaaccaatttaaaaagtgattgaatcataatgggtagatattccgttaaaagatataagacaaagagaagaacaaaggatttagatttgattttcaatgaattatcaaatcctgaaactattcaaaaattaaagcaacaaccagaagatgaaaatcttccaggtttaggtcaatattattgtattcattgttcaaaatatttctttgataatacttcattaaagggtcatttacgtggtaaagttcataaacgtcgagttaaagaattaagtgtaaatccttatacaaatttagagagtgaagctgcaactggtacaaatttagaaaaattctttcaaaaagttcaacaatataaagataatgaactatcaagaaaaaatatggaaactgaaatgcttaaagatcaaactaatgaatatgatgtacgtgatgaacaaaaatgggcagaaatgtatcctgaaaaggctacaagagaaagctttaaaggaaatacaggaagctgaattaattcaaaagagagctattaaaaaggctaaaaaattcgaattagaacctttaactgatgatgaaattgaaattgataattaattaatattgattgattcaattattgattcaatgatactatcatttcttcccctatatctgtacaataccacttattctatattttaaagtatcacttatgatattatttttttttcgtatttcttttctattagtctcttaaatatatttacttactactttataaatctaaattataaagatctattatatcattaatcattagctatatttattatctcaaatctttgattttaaatggtaatcctgaccttataactacatgacctgatgaaatctgttttgtgctaattctattacaatcaacatataaatcaggttcttcatgtggatgaaatcccggttgattacaattagttatcgttggtacacctggtggatcagttaatctgaaaacgcctgtcttcttggggaatttatcagatggtgcacaaacaatcgcaattgcttcatttaacattatttgatatgaattttggagtatgtaaatcaactgatgataggaaacatgattgagttggatgtgtatgaatccaacctaatataaataaatcaggatcttcattatcaataaattcaaacattttctcttcattttttgtagaacatgtatcctttgttgactcttgttccggtattagtagatgtgttatgaaaaatgcatttctgttcaatttaccaactaatattcccacatgtctctaaatctcgtttagtattaggttctgcgatttgcaggaaactatctgataattcagctggtaaaaatatagttctcagaggagccccaccttctgtaaaattaacagttttatggtttgagtcaattttgataggtgatgttaatgaatttatattcttagttagattactaattggcttgggtttactgaatgatgatctttcagctttgatttgtgaattggtgttttgtgatgttcttgataacacactatcatgattatgaaatacactattatcatatgcatcatccataattgcattatcgtgtatagttgggtataattgtgatgataaatcaattgaaggtttgacagaattgaaagatccatgtgataaagatcttagtttatccaataaatctttatcatcagaattcattgatgatttacgtctttctatgtttttcctataatcaatcaattcacgttcctctatctctttcctttccaaaaatttctttctttgtaattctctaatttcttgtcttgcagtttctaatcttttatattcatcatattctcgtttcaattcctcaattatactctcagatcgttccattgcaatggacaaacttggaaccaattgttgaaattcaaaatataattgtcctttcttattagccttatccttcttatatatcgctttactttcctttaattctgcattaggtgctattcgattagcaactaaatcaacaaatcttgaatataatatgaatgcatcctctcttgcaccttctgaatcataagctttagcatttcttaatatcccagatgctgatcttattaatagcttcaatggatatttactctcgtacattttagttctttgtaataataattttggatcacttggaatcacatttggtaaactgaatgatgtacttgaagtacttgaacttggtgacatcggaacaccattttctcccatttttgtttatttacacttttattgttttataacttctagatttgtacaatctagcatgtatacaaattattgaagaggaaaaagaagataatgcatgcatacacaaacccacccgccttgagtacatttaaagattacattcaaattaaatattgcgtaatcattcagatgatctattttctacaatacgaagcaaagttagtgatattttgtacgtgaatggttactcttttttacctaactttatctagttttataaagtatgtttccacctgattaaatctccaccactcataaaagcccataaacaattattatttaagtaagttccgtaaatacgtcctaaattaacatttttctcacttactggtagaatatttcttatagttgttgaaccagaagatgaatgaatgaatggtccatcagaaacactttcatgaagtaaaacttttttaggtgaaatgttaattttagcaaaaaaataatttttggaaattaatgcagctttcttaacatctttgtcataagtaatagaggtggacaatgaaggttgaaaaccatcatttaatttcaattgttgtatatttggaacttgactttgcggttctttgacttgtggagatggtatatcttgatttatcatacccattaacgatcgtttactattagttaaattcattgaatttagggtatttgatgatttattaaaataatcttttcttttagaatctaaacttggatcaattgaagttgatgataatgctctattcatttgatatcttggtgagcctaagtatgatgtaggattactatgcattttcttccccttccttaaacttcttggttgaaactcatagaatctgacatatccatcatcccctgacgtacatattgtataattcaaagaagcattagaaccttgtttacaaatttgaatatctcttacccatgatttagcaccttgtaatcttgatactaatttaatcaaaccttgatcattcttaactgatgatgaaaatctatttgatgaaaagaattcaaatgctgaaactaaatcatcttctcctccaacaagtaagaatctaccatctggggtaaattctgatactaatgcaccaccataaaaaataggtgttatatctgttagagattcggtgagtagatcgagtattcgcacaaacccatcatcagatgttaaaaccactatattatcatatacaggatgaactttaatggaggttatagcagattttgtaaatttataatgagctaataaacttgatgagttgctttttgtcttaagagatttataaactttcatatatttttgagtatgaacaagtttaggttgatattcaaattctgaatcttcaaaatttctatcaaatatgattaattcaccatcctcaaatccggcaaatgcataattcccacattttgaccattgaattgatgtcaaaattgcagattttagtttcccatttttattccatctagtatatttcattttgaatggattgaaccataatatatcaccagttgcaaatccaaataaaatatccagatccttttcacctttactgttttcactttggaaagttgcaacacatgtgataacactatttgaaattacaattctaacacatggaggctcaacatcgacatctttgggagtatcatttatgttaataatattgattattctaccatgagcagagactagtaattctttagaattattcagtttcctaacataaccatcacatgtattatatctttcaacaaatgttgatgaatttctagtcagattatttttaggtaatcttaaattgcttgatgggtttgaaattacagtggttttattattattctttgattttccaaatattttattaccaaatgtattgttgttatcattgggggaatcatttttataagatttaaatctcactatcgttgaaacacaaccgggtattaagtgaacaggattgaaacaatcagcaactaatggattcaacattgatcctattaaacttatttctgttttaccatctgaatgtgatgcaattaattctttaggtacacttaatggaggtttatctaattgattaaaacctaaggcaccactacttgaatgaaatttccggaggttatactccgtaaactttgaaagggcagcataagttgaaggatcatttggagagagaggagttctagctattctgagagcataatcaggctcatataattgatccaaatgagtaaatttaaactcttcactgttaacattatagataatatttggatctgtcgtctgagtcggatatatgtttgtagctaataattgagcaaaaatcacaggtttttgggtatatcttgaaatatctaatggaacatacatgataaaccaattccgcttcacaaatagtccacgctacactgcaattgctccaaatagagagatgttgtgatgaaaagtctccttattgagacatttttacactgactctgtcggatttaatttcattgtggctttcttcccgccaacagaaaaatcaaaactttctttttacgtaatattcttatctgttatgggtagtagtatctatgacacggttttttgttgtgttagtagctgttttgctgttgtatgcgtgttttatatggggactaagtggaagttcattgtaaaaattgtagaaatatttatcataaatgaaaatatgtaccattaatagttatattttattaaaaaaaagtaatttaacgtattaaagatttgagccccccaaaaaaattatgaaaaattaaaattattttagaaacaaaaaataagccattaatttaattagtaaagataccactttttaagagttaatatcaagataatgaattactaaattactattttgttctttatatttcaattaataggtcaaaagtggttttatggaggcatcaaagcattatatcaaaactattacgtaatcttttttttactttaacatgatttctaagattttgattgatttttacaaatatttttttcctagaatattccatcttgatcaactttcttctttttgactggagaagacagtatatatcaagtatgactaacaaagatatacagttatatgagccggatgaaacaaaaaagttatctgaaacagcactcagaacaaaagatgctttaaataaaataatcaatgcaaaaaatcacagtaacaaggttacaactctttcaaattcatcaactaataatgatagttcatttgtgaaatatacatcagcacaaattgctgatttatcaaacaaagatggtgaaattaaacacagacaaagagtgattaaaataaaagacgaaaaagttgatcctatgttaccttcatcatttcgtataagaaaaactccagcaggaccacaaacagattctatagttccagtcttacatgatgaggttaattctgaaaaacttactaaagctgatcaaaagaaatggcaaattgcaccatcaatatctaattggaaaaatactaacgggtttataattggtattgataatagaattaaaaattcacaaaacccaaataaattatcagaggaagaaatagtccgaagtacggaaaaattttctgcattgagtaatgcattaaagaatgctgaaaagaaggcaaaggaagatctgaaagctaaggcaagttggcgtaaaagaaaggaggatgcacaaaatagtgaaacacatgatcgtgttagtagacttgctgaagcttcaagaaatgaaagagaaaataaaaataacaataatgaaaagacaagagatgagatctatgcatcgatgactaaagaggaaagacgtgctgaacgtaaacgtagagcacaagaagaagcagctaatgaaaaaatcagcactaaggataagatacgtaaattggctagagaacaaggccgtgatgttagtgaaagggtcgttttaagtgtatctgaagcattgaagaaaaaacaaaaggaaagtatttatgattccaatttatattttaaaccaacagatgccaaagatgaaacaggtgatttggtttatgataagccattgttttcacaaactgctgctttgaacaatatctatagatctagaaatttggaaggatttaaaggtttgggtagtagtaaagatgatgaaagtgaatcaactgctgttaaatttaccaaagacgacgaaacttcaattatttctgattcaaatcatcaaacatccacctgaatttaaatgaaacatttgaatctttattttagtttgtcttaattgtattgtattcagctttgtatattagaaatttaataaatttaacttgtaactttaaaggaaaataatctgcaacatgaaaatttgtaaacgacatgaaaatttcaccttttaaaaaactatattttctctctaaagaactatacgaatggaacactacaaaacagttatcattggtgccggtatatcagggctagctgctgctgaatcactacatgagaaaaatgttgattatgcaatttttgaagcaagagacagagttggtggaagaattcaaactgatagaacaggtttagcaccttatgatttaggtgcatcatgggcacatgatacacttacaaacccactatttgacactattttggataagattgatgtcgaggagaaagatgaatataatctctattatgatgatcaacgtcccctatatttcactgatattaagggacctaaattttttgaaaataacaagattgaacaagtaatgcatgaattggaaaaatttgttgaattgaagtactttgaagaaatagataaagacgatgttccactaaaggacataatttacgagtatatcaataaacagaaaagattattaacaaaagaacaaatattatatgcaccacagttggcacgtcatttagaactttggcatggaattggatgggatgaaatgagctcaaaatttggtcttgttgataatgttggtagaaattgtttatttagaaatggttatgatacagtaattaataacattgtctccaaattagattcaaatcgtatatttcttaatagcatagtgaaaaagattgatagaacaaaattaccaatcaaagtggaatttactaatgggaaagttgtaacatgtgattggattatctgtactgttccacaaagtattctacagttaaaggtaccagaaattggatctattgaatggaatcctgctttacctactaggattcaagatgctttatccaatatgagttggggtaagttggggaagataatttttgaatttgaagaatcttggtggaaacattttgatactgataggtttcttgctcttgctaaacctgatgatgcagataaagttaatgatgggctacccaaaccatgggatttcccagtattggttttaaacttatacaaaattttaatgttccagcattattatgttttacacaaggtaagctcacagaatatttagagagaaatccagataaagcatggtcgtacatgtcaccaatactttccagattgataaataaagatttagacgaaccaaatgatattgaacaagttaacccacctactaatactatagtttcacaatggactgttgatccattttcaagaggatcatatgctgcatgtaatccaaataatgatcctactgatcttgtcattcaattagagaagggtatacaaaatgttaggtttgcaggtgaacatactatattagacggagcaggagctgtccatggagcttggatgagtggtagacgtgaagctgatcatatacttattaaggagaatattatagaaggtacaattgatgaatggtaggaattaactatgaatatattattatttatttagaaatttatagaaatttaaaagctatgttttgacaagaagttatagagttttgttttgatttaaatgctgtgtagtgcccatgtattcggacatatttatatcactcacggagacggattctgtagtcggaattacagaatctggtgaatttctagttagatcaggcagattgttattaaagaataaattattagcatcattgaatgaagttgtattagttgaatcaactgaatcagcgggtttgagaatttgaggtttattaaccattcttgagctttgatgtaaaatttgccacttattcctatcagataaatttgaattcatgattgtttcaagttctggattaagaactgaatttgaatttgaaattgagcctagagaatctaattgattaccagtaaaatcaggtgatataacagacttgagttgaaattgaaggtgaagaagaaacagagctttgatttaatggaattgagaatttgttaattgaatattaacagctaaatttgtatctgttattacacttgagccatcacttatacgaattccatttataattccatgttctacacaattaaaacaacaacaatgatttggatcacaaaaacattcatcaatttcatcaaccggtgatgtcattaaatcattatcattattattattattatcatttttagttgaacttaaatcttgatataatttattgaaaaatgtttgttcaaattggggtattgaatgattgaatttcaactttaccatatggtttaattgtactattattaaattgtgataaaacatcatttaagcttattacctattacctattaaactatcaacttcaggtaaattattcaaagaatttgatatattactcacattattattcattattgaatttggttgtttttgaattgtatttgtattaaaataatcaggatgagttatcattagatggaaatggaaattcatcaaattgttgttttatacttaagtttgaatttttatatttaatatgttctgtacaaccttcacaattacattgatcaggtggacaaagacaacttcctggaactgtacatgtatttgcaatatataaagtcatataagaatccattatctgctagtgataatgcatttgaattatcattttgaactaaattaaaattagaattagaatcagaagtaggattgttatcttcattcaaactattaagtagtttattaactgtattctgtcttctgctgtaaagaaggtgaatcattggaattaatagtaccatttactccagttatatcattttcttgtttcttaacttgaaattgtattatatcaccaccacttttaggaattgatctttttgtactattattaagtttatccttatctaatgaaatatctaattgttgagctaataactttttgaccggaagaatttttatgttttgatcttgaaactctttcaattatatctaaaccaactttactatttggaatttcaacaactggatcaagtaatcttaaagaatttttatcaacattgaaaacttgtcttttggaagctttaagaatatatacaggacttgaatttttattacaagaaattccaacacaacatttacatgatgattttttaggttttgtgactttatcctttttatttgaacaacatgaagatacttgaggtttttgttgttttgaacagcaagaagatttctgtggtttcgatactaattcaggagatggtgatactgtactattctccttctttactttaacttcaacttcatctttattattttcaattttaacagttatatttttattttcatttgcagttttaatttcattttttttctttgaaccacaacaggaagatgatggttgatgtgaaaatttaattgattttgcaactaaaagattattctttgaattatcattattctccaaagctttccttttctcatcttcatcatgaatttcctcagcatagatagcaattctttggaaagaatcagttaaaggtctacctcttgccctaactaaaactaacggtcgtcgtatatgtttacaaattgaagatctatgacctctaatacattgttcacaagcatatttttccccatcaactaatatcatttgctgggtattgtacaaaagcagtgatgactaatggataataaacatgtaatctgatagtatgtatctttattcttacttgtatagagactctaaataatcaattcaaagtgataatggataagaaattttttatggcaataatttgctcatttttccattacagtgttaaagtcccatgtatacaatttaatacatcacagttaatggggatgtggatatatacactctacttcactataccacactatcctatatacgctgttactaatctacatgtacaacgtataggataatgtacgattacagtaactatatcggagttaatacccaatatattcggacattgcaatctcgctgttttatctcttttgggtaatctaatttaatttcatgatttattgataatttcattattatcaagggcaagaataacagaaaacaaaaaaggtaaggtattatctttctttattcggagttgggttgaattaacgagataatcacatatattatgtctgaaggtaagaaaagaagaagaccaccactttcatgtacttcatgtagattaaagaaaattaaatgtgatagggaaaagccaatttgtggtaaatgtgcttcattaaatactgaatgtacttatgttacaccatcattttcatcaaataagaaaaaacaacaaaatatttcaaattatcaagtttcaatttctcaagttgatacgagtaaatcatcatttcataaaataaaaccaattactatattacctgagaatcaaattaaaattaatttccattataataataacactactaataatactactaataatgatattgttaaatcagatattggtataagtagtgttgaaagtactattagtagtgttgataatagtattttcagtaatattggtaatgaaattgatattgttgatattggtattaatgagaaaaaacgtaaaaggaaacaaatcgaattacaaattaatcaattaaaagctcaattagaactatataaagatgcatatgatcctgaaactgaatgtgtttcaatggttttaggttataaaggtgaaaaagttgatagtttatggagtaagaaaaatttaagattttcagcattaggatcattcttagtttcaagtatttgggttagagataatataatgaaaaatttcattagttcattttttgttgttagaaaaagtcaaaatattaaaactaataataaacgtgtttttaagaataaagtaatagataaatattatcctactaataaattaaattcaagtaatgacaatacttatgataatccaattgaatttaaatttttaagtgaacagttagatattaaaaagaacgaaactgaatatataactaaggacatttttttcaaaaaagttatccaaatgatgccaccgaaggaaattgttgattatcatgttaataattttttcaaaactatatacccattaataccaatacttgatgaaattatatttaaggaagaaattttcaaaataattcaattcccaaataatgaattagaatcaattaatattataattgatacaaaaattgattatattagaatttgtattcttttattaattcttagaatgtcatttagtcaaaaaattattgaaaagaatttttctaaaaagatgccaaataatttaaatattttaaaatatccaattacaccttcaattataccattaataaatttttcattaactaaattaaattttttaagaaagacatcattcgaagttttacaacttttattaatttatagattttatcaaattagaggatgtgaagatggtgatggatataatggatctgatggaccaatttatttaggtttaattaaatcaacatttagaacaattggaattaatttatcattttggaatgaaaaaattaataattttaaagaaattgaacaatttgttaaacaaaattttggtttaagtttattaaagagaggttataaaccatttattcatttatggaaaaaaatgagattaatttcattggaattagatttaactcatgcaacaatgtatggatgtaaaccacaatttgaatataaattaaatgaggaaagaatttttgaagtggaatatttattagaatttagtaataataatgatttaaatattgaaaaatttgcaaatgatagattaaatagtttccttaatgttagttatcaaataaatgatttattatgtaaacttcatgattatgataataaaccaacaattgaagaaattgataatcaagtcaaagaattaatttatattggagatattaattatgatttaacaaatatgaatgattataaaaatcaaaatattaatttattatctgaattgaatataattaaatctcaatcaaatatttattcacttgttattataattcaatatattttaatattacattcagaatatttatgtagtaaagatgatggagaattaattgaaaagggtagattaaaatttcaagaaaattttattaaattaattgataattatttacttattagtaataattttttaagagtttgggaaattgatgaagaaaattatgagttattattcttaacgtgtaatgatataaatgaattatttgataaattaatgatggttacatttttcatattaattagattattaagatttcaacattcaattaaaaataatgtggataataatataacaaatatcttaaaggaatataagaaattatattataatgttttaacagttttcaggaaattgatttatgttgaaagaaagttatcaagattttggtataaatcattaagatattatgcagctgtaattgattttgcagattggtttgagaatagtagtacaacgaattttcaatttaatatgaatgatgatatgaatgatgataataatgataataataataaaaataattattttgagacatatttcaatgaaaaagattgtagtgttaatgttctgacaagtattaatattaataaattgcaagaaataaatgaaaaatttgacaaattacaaataaaatataagttagataataattttggtattgaagataatagtaatgataataataataatattgatattaattataatgataatgataaattaattgagaatggtggtagtaattatttgaataattttgatttttgtattgatgataatggtaatgataatttgaacaaggaagaatttgaatttgatataagtagttttgataatttattcaatataagagattgggaaaatattggtgatatatttaataatgggattgattcatttatttagtttgtatatatatacagggatattataataatattataactaattaattaattaattaattattttttatttttataaccttcatattcaggagaataaacaccatttaggatacttaattctaataattttgctcttttctcttcctcttcttttctaattaaattttcaaaagctataacttctctttcagctctaaaagctgcagcagctgaaatccaaattgtatgatagaaaactctaatacggaaaccgaaagctctataaagaggagaacgccaacgtataaataattctgatggaattgaaatcattgcaccatataaaccaccaattaaagttgattttataataacttgttgtaaacgatttaaatgttcctttgaagtatgatgtaaatttggatttgagaatgaaccatcgaaatgttcatttgaatttgtaattttagtattttcttcagtcatttgggtatataaagagatgatatgatgatgatataaagatcaacttctattataaatcgactgatataatatcatgaagatattattataaccggggtttgagaggtattatcaaatcatatgatattacgtaatatacaacattataattatagagataaagaatcaattacaagtttcttaacagtttcattatatttatctttattatttctccataaaacagcagcatcaatattagcaggagaatttggatttggatcagcaatcattgaagaaactgataataaaattttttcaatactttgtaaaggcccccatctttcatcagctgattcataattaagtggatcattaccaggagaatgtaagattgatatacaaactttaccatctttataaatatttggatggaaaattggagttaaaaatttcattgttggaggagatagaggataatcagaagggaaatttaaaattgcttcgaaaataccaaattcataaggggtatcatttggacctgtaattatacaacgccaatgaaataaatcattatcatttaatggagaagctattataccatctattggatttttagttatttcctttaattctcttaataatcttttatgagcagttgaaaattttggtggcattattatataaataagtattgatatttatggtattaatattaatattagtattagtatagctgtagaattaaattcggggacctgtgagggtattcaaaaagattattgaagaaaacattcattacgtaattatacaataattacataagcagaaatagacgcatcgacgcaattacgtaattacgtaatacaaatatgccaaaaattggaaaattgaaaaataccccggagaataaatatagagaataaatatagagaatgaattttaaaaatttgaaaaaatgcgggggacccttttagggaaattccccgggattgattaaaattgtaacacagtttttatttatttatttattcctgggttattccggataaagtggtttattttattttaattttattatactgtggcaaatcattatctttattattattattttatcttttaatttcattactattcttttcactcttttctttattcaatgggttcagtatctcctaatactcctaatattggtattagtactaataccactactaataccactactaataccactactaataccactactactaataataatataccaaataacctaaactcaatactaaatcctacttcatcttctcaaaatttatcatctttaaataatattataactcctctctctaataccaccacaactacaactacaaatacatctacaccaccacgtaaaagatcaaaagtttctcgtgcttgtgatgaatgtaggaggaaaaaaattagatgtaatgcaattttcgatataaattcaaattcaattttaaaaatttgtacaaattgtgataaaaataatgataattgtacttttacaagaattcctttaaagagaggtccaagtaaaggttataataaaagattatctgatgatgatatattagataatattaataacgactcaactcaaattgttataaggcgaaggagtaattctcaaaagattagtaaatccattagtattaataacaatgataccatagataatatcaatactaataccaataccaataccaataccaataccaatactaacaacaatgtaactttaccacctttgaattcattatcaatcccaaatcaaaatcaatcaccatcacaatcacaatctcagtccccacaacaacaatctcaatctcaacaaaaattacctcaacatgactatgttttggaaagtaccaacttcaatgccaacttttaatccaaatttattatctcatgataggaaaaattcagttgattcaacaaattcttcatatagtaattcatcatttaattcttattcgaaataaaaatcttttatttaatgaaaataataaatcaggttcatcatttaatggtaattgaaaattctgatagtgaatgatgattttacaaataattcaaataatttaaataataataattcaagattctctcgtgttaattatcaaataccaaccaatttagtaaattcaaataattctcctagagtttcatttgataatgatagagaaagatcaagtatttcatcaattttatcaaataattcatcaattttaccaaaaattaatttacctaatagaaataataataaaaatataattattaatatgaatgaaattaataatttattagataattattataatacattatatcaagaataccctttattaccatcaatagaaattatgaaaagattcaattagtaaactaattgataatcctgattataataaaatattagaattattaataaattctttaaattcttttaatataaagacaattatattaaataataatttacaaaaatttgaaatttcaattataactcaaaatatttttaaattatttgaaactataacttcattatataatgaaagatcaattttaattaaatctgatgaatgtaaaattgttttcacatcaatcttaactttattaaattatgcaattgttttatcaggtactgattattcattaggttttggaatcgcattctcatttttcaaagattggggaattttcaaagaaaattatgaaagtgaaagttttataaatttaattcaattagttataattgataatttacatacattatattttggagttccaagaagttcaactattggtttagccattgattcatcatttattgaaataattctaaataaaataaaattaaaattaaattattcaaataatttagaaattgaatggatttcaattggtctttatttgattactttaaataatgatttacaacaattagactagtattgaaaaattagaattaattaaaattactggtacaaaatataaatttatgtcaattattaaattatattatgaacttttcatttattttaaaaaattagaaaatgaatttcaaacttattaccaataataataataataataataataaaattctaattcctctttaggatgaaaatttgaaaatatttatttataatattgaaattgatttactgaaaataattaaaaaaatcacaaatttaattgatgaacaacttgatgatcttgaactatgtaaatccaatgttttaagttgcaattattttaattaaatgttatagaatatcgaaaattaatgaaattttaatcaaatcaattattaatttaaataatatattagaaccatcattaaacaattcaattaatagaagtagaagtaatagtacaaatagttcaattgattcaacaattatggaataatattacaaattcaattaataatttagctgattcaacatttacaaataatttatcaaattttaatagtagattattaaaattaaatgagaatattgatttaaattgtaagagatgtcttaatattaaacatattcatgaccattgtaatgaattattaatgaaacttcaattaatgaataatattgaaataattataccaaggacaaataataataaaaaatctattgaatattcaattgttatacataattggattagattaactaatgcatattttacaggtgaaataactagggagggtattaatggttggtgttatatttagattttatagaacaaagaacacagaaaagaaatgaattatatttatttaaaaattatatataatataataatattattatttaatgattaatcaattaacgacaaaaagaacaactagaatacatgcataatgatatcttataaaacacgatcactatttaatttaataccaggtactacattatctacaacaccttcatttggttcaacatctaacagtgtattctttggacgatttgaaccatcatcatcaacaagtttattctgtgacagattttcagcttgaccattagataatgaatgatataaagtattcttttcattaccttttggtacttctaataaatttgcatctgaaggtgaattttccctttgagcatatactgcaccttgttcattagagattgtatccatcatacgattacgtggtttatcatcagttggtacaccaaattgttgtctattattctctgtatctaataatctattcttattatcttcaccacttttctgaaatttttctttaatcttatcaaatacacccatgattgttatttacggaataattaaataataacaatcagaaataaagcagaggttagaagattaaaggaaaagaaaagaggtatattgaggtatttatacatctttatgctgtaccatctctaatctggttgaattctatgtattaaaatccagtttgaaacatattaataatattaataataatctgaaagtctatctttaaaaagacctttccccggttcttgttccataatgacccctgacatcacatgttgttaattgttacataattattttattctatgatgaatataagggtttatatttataatatgtatagattctactcttcatacacaatgttctaactgtagtggtatagtataaagatggtataggtatatcaaattgtatatatcaccctatcggaatgtaattatgagaaatggcttggcatccgacagtgaaaatgactgattaactgagggtttggtaaatttaaacattccgttactgatcgtatacttttctgtagtgggatttaatatataatgaccggatataggttagtacttccaaataatactaataatgatgaaacaaatgtaacaattaaaggtattatatttgatatggatggtacattaacaaaaccacaaacatggatgtttggagaaatgagaaatcaattaaatgtaccaaatggaattgatattttaactcatttagattcattaccaacaattaaagataaagaagaagctgaattaaaattaaggttaattgaagaaaaggcaatgattgaacaagaaccaacaattggattatttgaaactttacaaaaattaaataaattagatataaaaacttcaatttgtactcgtaatgtaccaaaacctgtttcaaaattttgttcaaaatttcttaattatgatccatttagtgatgaaaatggaaatggaaatagtattcttacgggacctattgtaactagagaatttaaacctccaaaaccttctgctaaacctctgttacatataattaattcatggaatgttaaaccaaatgaagttataatggttggtgattcaaatgatgatattgatgcaggtttaaatgcaggttgtgcagttattttattaagacatgatgataattatcatgttgaaaaatcttataattttgaaaataataataaattagatgcaattgtaactgatttaaatgaattatataatgttttagaaaatggattatatgttaaatcaagagaatctatttaagttttgaatttgactttaacggattatataatcacctgaactagatatatatttaacacctttgaaaggttttggattaactgaatcaattaaattaattgatttaactttaataccacttggtacactaccataatgtttatatttaacttttaaaaatttagggaataataatgatttattattatgattatcattatttacatcatttccatcatttgtatcatcatcatcatcatctgatactgatgctcttaatgtaaatttaccaccaactacaatatctgaatcaaatttccattcataattacccgtctcagttcgtataatagtacctgtactatttcttaaaacttttaaatttgtattatcatttgaaattgaatcctttgatccatattctttattattataattctttaaattatctttatcattaaaattatttgatgatattacatttttctctaatttatttgaatctattaataaattagatgtatcaggtaatataatttcaattgataaatctttaatatcttttaaaactgatgatgatgatccattattacttatatttgaattaattgaattacctgtatcaattgaaatttcaaattcattcattttaatacctaaacctttaattaattgaacattaattaatccaatatatttatttatatttaaatcatcttcattctcatgatttaattcaattaaatcaatattatatgataataatttacatttttcatcaggtggtataagttgaattgatttaccatttgaatttttccaaattgatttattaattgatttatgtaatgatggataacaattgtttaaattgaatattgatggtatatttaattgtatatctaatattggattatcagataatgaagttgttaaattcatatgaccatgaattgtagctttttgataacattcattattgatgaaataatcattatttgaattaaaaaatgatgatccatttgttgtatatttattatgttttttacttttatgctttttcttattgttattaatacttggtgttacaattatatcaattgattcatataaatctaagaaaatttcattttgaatattttttatatcaattttcctccaaggtattggattaccagatttttctaaaattgttgaatatttaaaagttgaagtatttgaatttcttgaaaaattattattatgtgaattaccagaaactgatgtcaaagatggtgatgaaatattaacatttttaatatttgaaattgaagaagctgcattattttgaatttgctttgttgcactaacaattttatcaattatactatcatttggtaataattcacgtaattgatttaaatctattataaaaggtacagatgcatcaacaagttcttgtaataacataattattctatgagaattaatttgaattttatgtggtgataaaattgatgtttgtaacattaatttagttgcatcaactagaatttccaaaaatgaaatatattgtaaaggattgtaggaattagcaatataatttttaatctttggtagtttaactgattttgcagtttaatgcattcttacgattgattattatatcactattactatcactatcagaactaactttcatcatcattcatcatcttcttctctcttcatcatcagaaacaacatcaattgtagagggacgtatttctccagtaacagcaaagtacactcgatcaactaaacaccataccaatatagtgttattatcaattaatataaaattattattattattattattactaccattactactattttcattatttgcagataaaattgaatttgatacgataattggaggaattgaatgaccaattaaagtattgtttaatggaaaatgaagtacaggtagatactcattatccagtatgtatatagcatccaaaagacccatacccagtagtgtaattcagtgataatagtccttctactactaataatccacctacaattgaagcgaggtgtcagtataatacaatttacaacgtcaatgagggctttcacgatttttcacaattaagagcgccactatataaagacgaaatgatttccagctttttttcattcctcgattgcccttttttgcaaatcatattggctcagctatatttatttattattatacacacaacaacaacttaatgtctcgtcttgatcgtcttgccactttgttagagactggttctaatgctatagtgaggaacactgccgctgatcaattagcagatttggctaaacaacatcctcatgatgctttatccctcttggctcgtgtttatccctttctattaaataaacgttgggaaactagaactgcagctgcaagagcttttggtggaattgtatctcatatacccaaatgggatcctaatcaaaatgataatgattcataatcatggtaatgatgatatgataatactcctgatataaagaaagaatcaaatgatgaaaatgactttgactcagaattagacacgaaactgaaaaatttaatggataatgatcaatatgaatcaatgttagtatccttcgaagattacaatttagaagaaattttagattctggttgtgtattattatcaacttcaactgatgcctttgatctattcaaaaatgtcgtaaagaatgaccttgatcaaaataaacgtattaaactttctgaatttactaaaaaaacattctttaatacaatgaatgaaactccaaatattaaaactgaagttaaatactgaagatagccataacaataataacacagagattaaaactgaaattaaatcagaattcgaacaaaatcctcaaattaaaactgaaataaaggtagaagttcaaatcagaaccttgttctaaaagtttcagctagaatgaaagcattggctaaacgtaaagctaaattgaatggtaataaatcagttaatgtcgatatcactcaaagttcagtctctaatcaattggaaaaatcaaatcttattaatgactaattcatcgaacaaacattcacttgatataacatcacaacaaaatggtgaaaaattagttattgagaataaaccattacaagaaacaatttcttcatttgctaaatttgaaaatcatgtttggatattacaaggtgtttatgaattacttattaaatctttattctctccaaattgggaaattagacatggtgcaaccttaggtttacgtgaaattattaaacataaagatcaagcttattcaactggtcgtgtaaagggtaaaactagagctgaaaatgatatacgtaataaggatactcttcatgatttgattagttagattattagctatttttgcaatggatagatttggtgattatgtatctgatacagttattgtaccaattagagaaaatgctgcacaagttttagctgctgttattagatgggtagatgattccaactcttgaactagttttcaggtgcgttatgtcaattgaattcaacaaaatgaaattaaaaaacaatgttgggaagcaaaacatggtggtttacttggtcttagatattttgtctcaattaaacctgaatttttattatctaataatgatttccttttacaaacttcaaacatagtcattaactgtttaagagggaatccatgatgatatagataaagatgatgatattcaaactgttgctgcttcaatcttattaccaataactaatcaaataatgatcttacaaaaagatttaatcaaagaattattatccgttttatggaactgtttagtcgatttgaaggatgatttagctgcagctactggttcagttatggatttattaggtagtctatgtactgaaaaaatagtttctgatatattatatgaaatgtcattaaattcaactgattggaatttctcaaaattagttccaagattatatccatttttacgtcacagtttatcaaatgttagaaaatcagtcttaaagacattaatttcagtttgttgaaatggatacaacaaataataatattgaacattcaatgcatgattgggttaatgatcgaatattaagattaattttccaaaatttattaatggaacgaaatgatgaaattttagaattaagttttcagttatatgaaaaactaattagtcatttaactttcaaaatcttcaattgattctatctttttaaatcacattccttcattaattgatttaatgataactccaattggtttaccaagattcaattattcaatgaatccatctaatattatacgtccatctggtcaatcaatgaatatgaatgatatccaattaacaggtcttaattataaaaataattcatatggaagatcaagtttatctgataattcaaaaaaaaataaaagaaaagattcttcaactgataatgattccaaaaaggataaaaatcaaatttctcttggtatacctgcatctgaatatgatctgcatgttaatattgatgctccaatgattaattgtgatgttacgttagtttcatttgatacaatttataaaacaagattatactctgcaaaggcaatgggtgaaacattatccagattttccaatgttgataatatttttaatgtctttcaatttaatattagtaaatttgaaatcaaattttttaacctcaagattaatatcagcatggattattaatgaatttttcaataatgttataaaacaaggtaaaattgatggtgttgattattctaaaatttcaaattttatttctccatatttattagaatttcttacagctcctaaaacatcacttccatttttcaaagaaattgttccattattaagaactactagatcacattcaacttatatgctttcattatttaaagaacatgcacatttatcatcctctaaaattaaaagtatagcatgttttagttacaggtgaaaatgatgcctggtccaggtgcattttcaattaatgatgccaaagatttagtctcaaattggtttccaaatgtttataaatcattaagtgcaagtatcagaatttcatttggtaagtcatttgaactttccaaagatcgcgttcaattaagcattgaagaagttgaaaatgaatacaatagtagattaaattctgttaatgcatcaattgctggtgcttatattcattccattgtagtttgatgataataataaagaaaataagttaccaaataagcttaatccaatcattagatcattaatggatggtattaaattaactgaaagtgaattaattcaaaaatatatttcaatcgatgttgcttatctaatcaataaattaattgaagaagatagaagaaatatttctgataaaatggttaagaatattgcgggtttcttatgtgttgatcctgttgaagttcctgaaattacaacatttaaggatttcaaaggtattttaagtttggttagagatggtagagatttagttgctaataatgataactgatccaaaatcaaagaatacaaatgaaaatgatgaaaaatcaactgttgactatgttactaaaggtgcaattgtgaagagaagaggtggtaaatatactttagaatcattggttgaacttttcaaagaaagtttatttgataaattaccaaaagttaaaatcattgaatgttaggaacctttgaatttattaaatggtaattattaatgaattatcagataaagatggtcaaagtattattgactcgtatgaattaatcaaaatattatttccatggatttcacgtaatttacaagatgatgttttatccaatattgatatcattattaaaggattaaattgtgaaaaatcagtttttagatattcatcagcgaaatgtttagcaagtataattaataccatcccaaccagaggatttcaacttttagttgaaagggttttaccattaatgaaaaatccaattagagtagaggatagacaaggttcaattgaatgtgtttatcatgttgttcaattaatggattctaaaattttaccttatattgtgtttttaattcgttccaattttaggtagaatgagtgattcaaataatgatattagattgaatttcagcatcaacatttgcacaaattatcaaacttgttccattagaatcaggtattccagatcctgttgatatgccagaaagtttattagaaggtagacaaagggaaagagaatttttaaatcaaatgatggatccaagtaaaattgaaacattttcattacctgttagtatccaagcaacattgagaaaatatcaacaagatggtgtgaactggttatatttccttaataaatatcatttacatggtattttatgtgatgatatgggtttaggtaaaaccttacaaactatttgtatgatttcaagtgatcattatatgagaaatgaaagatatttaaaggaaaagaatgaagaagatagaaaattaccatcattaattgtttgtccaccatcattaacaggtcattgggaacaagaatttaatcaatatgcatcatttatgaaagttgttgtttatgcaggtccaccaagtgttcgtaataaactaaaggattgaaattaaaaataatctaaaggatattgatattgttgtttcatcatatgatgttgttagaaatgatgttgaatttttgaaaaatattgattttaattactatgttttagatgaaggtcatattattaagaatccaaagtctgcattaagtaaaagtgttcaaaatgattaatgctaatcacagattaattttaagtggtacaccaattcaaaataatgttgttgaattatggagtttatttgatttcttaatgcctggatttttaggtacatataaacaatttgatactaaatttgctaaaccaattgcattatcaagaaaaagtaaaggtaagaaagaagcaagagaatggtgcattagttttagaaagtttacataagcaagtattaccatttatgctgagaagattaaaggaagatgttttaggagatttaccaccaaagattattcaagattattattgtaatttatccaatttacagaagcaactttataaagattttattcaaaagcaaaagaagaatgttattagtgatattgaaaatagtaataatttagaagatgatgaagcagagagtaataaaggtgatccaaaacaacatgttttccaagttttacaatatatgagaaaattatgtaatcatccatcattagttttaactaaagatcatccacaattttatgaggtttgttcatatttaaagaaatataatatgaaacttgaagatattgaacatgcaccaaaattattagcattaaagaatttattaaaagaatgtggtattggattaattggtaatgaaagtaatgttatttcacaacatagagcattagttttctgtcaaatgaaggatatgttagatatagttgaaaatgaattattaaagaaacatatgccaaatgttacatatttaagaatggatggttcaactgatgcaagatatagacaaaatattgttaaaaaatttaatgatgatccatcaattgatttattattattaacaacgaaagttggtggtttaggattaaatttaactggtgctgatacagttatatttgttgaacatgattggaatccaatgaatgatttacaagcgatggatagagcacatagattaggacaaaagagagttgttaatgtttatagattaattactaaggatacattagaggagaaaattatgggattacaaaaatttaaaatgaatattgcatcaagtattgttaatcaacaaaatagtggattagcatcaatggatacacatcaattattagatttatttgatagtaatttagatgatagtaataatgaagagaatgaaaatagtgaatcaaatggtaataaacgtaataaggataaggataatgatgatattacagatgaaggtggattaggtggtaaggcaggtaatgcagttaaagaattaggagaattatgggatactaaacaatatgaggaagagtataacttgaattcatttattaaaacattgaaatgattattatgtaaatatttaatgaaataaaattttatagaccttttgtaatgatagtacagacttgtaagtataatttgctgagccatcagttacgtaatctcctgatacggatataagagaatagcagttacgtaattgggaaataaatggaaataaaagaaaagaaacgagcgaagaggaaataaaataccgttattattattttagtaatagtaaaataattatgatcttatataatgttatacgcccccttgacctatcgcctcgcttgttctaataataatcatatagcatgttgaaatagtcggacccgctatttcccgatcaaataataatataatatgacagtggcagtggatagacaatagagaatgataatcaaagggaaaattaaatatagaaaataaccggttcctattgttacagcagagttcctggctgtgtttttgctattaattttttaattttctataattttctaatttttttaacttttttaactttttaccaacttttactaggacgtggccctattgttttggtatttttattctattttgctttatttatttgctttcacagattcaccagtttttgttttactttcaccagttttcagtctcctttttttctggtggacctttttcgttatttgttttgtttgtttgtttgttgtattcttcttttatttgtatctggattatttaactgttccttataaacacactcatactcacactcacataccagtagtacctcattggagttttatattcatttgccgaatacagttaaataaataataataataattaaattaaataaataaacaatcaaataaataaatacttaacaacaaatcataacacatactccccctatctatacaaatgtcaaatctttatgataaaaaattcatcgatcaatgtgcaaatacttggattgatataggctcatgtgctgatacacttggacaagttgaaaaagctgttgaagctttctcaactgctttacgttattctcctaataatgcaaaagctttaactcatttagctcatgtttatcgtacaagagatgcttatgctgaagctgctgatttatatagaagagctttagcattagatcaacataatggtgaaacttggggtttattaggtcattgttatttaatgttagatgatttacaatctgcgtatactgcttatcaacaagctttacttaatttacaaaatttatcagttccaaaattatggcatggtattggtattttatatgatagatatggttcattagaatatgctgaagaagcatttgttagagttttagaaatggatcctaattttgataaagcaaatgaagtttattttagattaggtattatttataaattacaaaataaattacaaaaagctttagaatgtttccaatatattttaaatactcctcctgctcctttaactcaaactgatgtttggtttcaaattggtacatgttttagaacaaaatagagattttattggttcaaaagatgcttatgaaagagttttacaatcaagtccaaatcattctaaagttttacaacaattaggtggtttatattcacaatctgatgctcctttctatgatttagatattgctttacaattattaactcaatcaattgaattaaataatactgatgcaaattcttggtattatttaggtagagtttatatgtcaaaacaagattatccaaatgcttatgaagctttcaacatgcagttaatttagattcaagaaatccaactttttggtgttcaattggtgttttatattataaaatttctcaatataaagatgctttagatgcttatacaagagcaattcgtttaaatccttatttatctgaagtttggtatgatttaggtactttatatgaaacttgtaataatcaaattggtgatgctttagatgcttatagaagagctgcttcattagatcctgaaaatcctcatattgctgaaagattaatgcaattatcaaaatatgaaaaagaaggtggtaatttaccacctccaattcaatctcaacatcaattatcaatgccatctcatcaaatgattcaacaacaacaacaacaacaagttcaacaacaacaacaacaagctcaacaacaacaacaaattttatcattacctcaacaacaacaacaacaagcaggtttaccaatttctcagaatactcatattcctcaacaacaacaaccaattattcaacaatctcaattacctttacaatcacaactttatcaacaacctcaatcatttgatctaaatcaaaaaatttcaactgaaattaaatcaaatgagaaaaagagggaatcttcgaaagataaaaagaaagataaagaagaaaagaagaaagaaaaggaaaagaaaaaggagaaaaagaaagagaaggaaactgagaaagttgaaaaagctgaaaaagctgaaaaggttgaaaaagttgaaaaagttgaaaaagttgaaaaagttgaaaatattgggaaatttgaaaatgaaccaaatattaaaaagactgaaactgaaactgaaacttgtcaataaacctgaaacaaatggtttaacaactataaaagttactgaaccaaaacttgattcaaaaattattgaagaaaagcaatcagttgaatcaaataatgttattccaacaacaactaatataactgcacctgccactaatgaaacctacaccaattaccgaatctgaaacttcaaataaacgtcaattagatgatgatgcaccaaccagtgaagataaaaaaattaaattagatgatggaaataaaaaagaaagttgttgctgatgttacaattgatgcaccaattgaacctacagactgttgctccttccgctcctgctactggtgtcaaagaaactacaactgatgccacttctgctgctgcacctgttgttgaagaatctaaatctgaaccaactgtcacaccggaagaaatcaaacctgaagacacattagttccattaaagacaattgatttaaaaccaattgatgcagatgatattaaagaattaaaatctgttgataatgttgaagaaattgaaaatgatcaaaaattagaaaaattaaataattcaaattttaattcaaattcacattcaaattctattgataataatgataaaactgatttgattaatgaagaacataaaattcgtgaagttgaagaagatgaaaattacgatgattaatttatatgtaaaacttaaaaatagtgtatattagccatgtaatataaattttatcaagaaatggaaagaaatatataaaaaatgtgttataaaagaaacgataatatatttatgattattcaataactttatctaaaaactgagcaattcgacgtaatgtatcttccttaatattatcaggtacacgttctatacctttatcctgtaattgtgcaattaatttacctaattgtaattgtttatcatctgtatgttcaattttattaactgttaaatttaaaaattcatcataccaaccagaatttcgtaattctctctctaaatgattataaatttcagcatatgcacctgattgaacaagttcaccctgtattctagtatgtaagtcttcgtttgacatcgtttgtgtggtgataatatcaacccaaaattgtaaataaatgaaacaacgttctttaccgtttcccccaatatacacaaaatgacgtttatattaatatactgatgattaagtaatcattaaattcaaacattactcctccatgaactgactcagtcaatccttttgatttaatgtttttaagacttatcaaagagactatcatttaaatcatcaccggttaaacgaaagatgtcagcaaataattattccaaagcatcagaattattaaatcctaagaaaacaaatgcaaaaataacttcaataactccattaaataatgatcaatcaagatttattaaacttaaaaaaattgattatattacaccattaggtgataaagcagtatgggaaatggcaactagatctacaagaccaattgattctaaagttgatgcagttattattataccagttttaaaggataggtgaaggtaataaacaattattatttgttagacaatttcgtccaccaattggtggtatatgtgttgaattcccagcaggtttaattgatccaaatgattcaattgaaagttgtgctttaagagaattaaaggaagaaactggttatattggtaaaattcgtcgtaaatcaaatattttatggagtgatccaggtttagcagatgcaaattgtataattgtttgggttgatgttgatttaacaattgatgaaaacattaatccaaaacctcattggatggatcatgaagtaattgaagttgttaaagttaattttaaagatgttggaaaaactattgatgattggtcaaatcaaggttatttaattgattcaaaagttcaatcattcatatttggaatgagtctgaatgattaatcctttaaaaaatatagtatattacaattacaattacaatataaataattttatttataatttaacgaatgtatctttgacgtgtttctctaacaggtagtaagatggtttaaaaactttatttcttaaaattctatctcttggactatcaatatgaaaagtcatatccgttcctctggtagaattcaaaagctttattgttttgtgaaaatactgttaaaccaatacctgttatttctaaatatggatcatttagatcattaatttcttcaaaataatcaaaccataatttcctcaattctcttgatgcatttagttctttaacaattatttctaacaagtttagaagttcaggttcctaatcctttattccttaattgtggcattaattgaatttcatataggtataacaatgacaattcatcatctttaacaagattaaatgataaaaatccactagattttccattttctttgattagtaaatacacaagaccttcctctttcatctcatcaactttttctgtcttccaatcgtgtccctttataatggtatataacattcctaaattttgatccaataatgttaaacaactattcaaaatcttcatttgataatttctctgattctatgacttcaatatcaacatcctctttaaatttcttatccttgatgatagatcttactatcttagcagcaatagtagcttctaacccgtccatcctgatattaatatacctagatatcactatagctataccctacaataacccatagaaaacttcagttgtcccaagtaacataatgaaatctatcggaattccttccttttgggcgaattttccatgtcaccactaaactttcttatcagagaggccaagatcaattgatctctaccaacattacaacaactttcttttcatactgaccaccacatcttcattcaacaatgcttgtcattaatgaaaaaacagttacaaggatatttgcaagtttatcaccagagggtgtccttaaataccaagagagcttgataaaaggattattagaatatcaatcagataattcaattataccacaaagaattgtcactacaacaccatattgtacgcatctatttatggcatcaactggttcacgtgttggtatgaaggctataactggttcaaaggaaggatttaaaggtattacaacaattttagataaaaataatggattatccattaggtattattaatggtgcaacattaacagcatttcgtactgctttatgtaataccttaccattagttaaatattatccaattaatgaaacttatccaaataatgaaacattaattgcatttggtgttggtgatcaagcaatttggcatatttcgtttatctttaattctttatccaaaacgttttaaaactgttattatttcaaatagaacagtttcaaaagctgaaaaattatgtgaatcatttagaattgaatatcctaatgttgaatttaaatcattaggattatattcaggtgaaaatgatgatccattacttgaacatttcaaaactgctacagttgttttcacttgtattccaacaagtgtaccaactgtatcaattgatttaattaataaatgtgaaaaatcttgctttattggtgcaattggttcatataaacctcatatgacagaaattgatggtgaagttttatttaaacatgttattgataaaggtgggaagataattgttgattcaaaggaacattgtttacatgaagcaggtgaatttatcattaataaagttcaagaggataagttaattgatattgctaccctttatagtgatgaatcatctatcaaagagttacgtaagcagaagatagttatatctaaattagttggtctctgtattatggatgtatgggttggaagtgaatgtcttgaatccgctaaaagggatggccttggtattgaaattgaagatttctagtttaatgtatgtatgtatttatgttcatgtatattgtatagacatttactataatgtaatagagtatattagaaactatataatagaatcttcacttctaaatttccgaccaatgttaaatttgcgagagagatttttcatagtggaaaaagttgaattttccaaattcatgaatttttcaaattatttcacaaacagtgaagggttaaagtgaatcctaggattggagaagtaaagagtgtaataaattctgtatataaacagttacaacatcaactatgctcagatcacatgttcaagtgagacgtgtttcattctttttaccctctttcaggttgaatgaatttaatagacgtcagattcaaaataatccaactgttgaattgttagaacaaaattataatgaattacaaactagtattaaagcaactgaaacgaataaatctgttaatcctaatcaaatattgaaatataagaaaaatatccaaatatgatttcagtaaaaatttaattccagaaagtgaaacactactctcatattcattgaatcaaactgatattccactgtttaaatacgaaaatatagatcaacaatatccatatgatatagccaataagtactgaaagatttatagctgttgtgaaacatttaagtaagtataccagactcaaaacatttgtatgatattttaaaattaaattgttccaaaatatcttctttaagaaatcaattgtcatctaactgatatttcagttatcattaaaagagttacaatctacaattcaaatctaaataaaaacttacgttttcttacaaagaataaatctgttctcaataaatcttcaaaatattatgcatcaacatattaaaaaatgcaatgaaatttctagaactacatatgtctcaactagaagtatttttaatcaactctgtactcatatgaatttaaagacttctgattatgaaaatataataagttactattatcaaatgaacaaatttgaaaaatgtatcgatgttatttcacaatttgaaactaaatcaatgaattcaaatagtttacatctaactaataaaatctgggcaattaaacttgaaatattatcttatactactgttctattttggagattatttggaaatccaatttatagagtaagcacatcctaaaaacttaaatagtaacttatacttatccacatcatacccataatttccaaattttaatgcaacgatatgaaaatgataaattaaaatataaattacctgatgatcttacaattgtaagtgttctcattaaaggacttgggaaacattgtgatattaatgctctcaataaattaattgaatcatattggggtattaaaataaatattgataatgaatttaataaagttgaatttttgaaacattttaatataaataaaaatgttcccaagtttattatggccaaatgaagatattttgaataagtattttattagcgtatgctaaaaatggctatgtttcacttgctattgaaataaataatttaattattgaaaagtattattcaagtaataataataattcacgttttgttaaatattgggaaactgcattattatcaactggtttatttggtgaagcagttgaaattcaattagcagcttcattgaaaaatgtaattgataaagatcttgatgatcagaaaattgatgaaagtataatgaacttaagatataaattatttgatgatgtttataaaatggctgaaagatcagttggttcaaaaaatattactagagagatgattaatttaaagattaaatacttcaacgagtgatgcattaatgaatcaattaccaattgtttatagacaaacacgacatattgataataatagaacacgttcaaattatgcagctaatattaatacattatacaattatgttaaacaatgctgtatagaattagcaagtcgtggtaaatttcttgatgcaaatactttaattgacaattttgttacatctgagacacaaattaaaaaattaaaggaaatgttagctgaaatgcaaggaaatttatgctagagaaagagtaaggagggatgaagaaaaaagacgtatagtggatgatgataatgattttgaattatggtgattcattaattaccaacttgttaataattatagaaaacgagattaatagagatttgtacttgtttatttatttaattacagtaatgactaaaatattctatgtgatatgcaatagagaatgtaaagtaataaaattagaaaatagcaacttaatcattaagagcaatttgattaaagaattataaaccattttgtacttaactaaataaatgtgggaatgataaaaaaaattaatagcagaagaatttgaagaaggtatatattataggattggaacaagttcgtttgaattcatatatttactagaaaatacccatatccatctaaaccaaaccatttgtgaataatgtgcccaggtcatagttgaaaaattcaaaaatagactgtttaaatcactatacaatatcaaagatgtatccttaggttgtgaaggtaaataatctgcaatatgaatatcataactttcaagcttttcaattaaaaatttactatttgataaccatttgatcattaactcgatatttgtaactaaaaatgatgaatatttgatgaatattttccatgattttaatttgtatgctttaaccttatattgtaaagcgtattgttggattgccataaaaacggatttatggtttggatggttagatacaccatcttcatcaaatgataatagtacaacatctttattatttatactatgttcattttggagtttcttaagttcactctttatagtattgacaacatcactagtttcccaatatattttgatgctatccttataatctaaaactttccatgatgataaatttaacaaattagcagctttttctaattctgttacacgtactgcacctaatccgtcatatccgccatttgataaacaaattaaatgaattttgttattataattagctttttgtaattcaagtatggatggtgtgaaaaacattgattcatcgtctggatgtgctgtaaacaatacaatatgtttattagtaaggccattattaacaattgaaggggcattgatcccattgtagaatcctgattttaaatatccgtcaacatcaagtaatgatactttttcagttggtagaacgtttggaataattgtggataagaatacccatatcccaaatacaagtatcagcaagtaagaacttctcagaagacccattgtgttgattatttgataagttaaatgagtagactctcttgtttaacatcagaaggtatatacagaattgcacagcttacctcaaaaaatttggatttcaccaaatcgaagatttttcaacgtttaacatggcagtagagactttaatctcttttctcctgggtgtagttcaagtatcatcactagtcaccatgcgtctctgctgtttgagggggagtcgtcgctatatttctacaggtagaccatttgaaactttggatactttccaagttcaatcagctccacagcttttacgtgatattaaaaagatgaatcctgaaactgttgtgtctccctttgttttattagatgctaatgtagcaataaatcgagtattgaatggttcttttaaacataatattgttgatgaggcagatttatcaaaatatgattatagtttggctgttaaaactaacgaagatgatttttatgattttaatgatgatatttcaaatattatcaagtgggaggaaaaatacaatcaaactacatacgaacatatactgccaggtaaatcaccatcatttgatattgtccagtcacttaaagaagatatacttgaaacttttaagtcaaacgattatagtttgtcagaatcaataaattttttatcctctaaatattcaaatttaagtcttgaatcagtaaccatgttttactttaaagttattccccaaataggcgaaacagaaaagattgaaatgataaaacaagcttttggtttcttcaatgataatatattacatttccacgatcatacaatagttgatatttgtcatactttattgtttacagataatgttaaattagttgcaagtatcgttcaagcatataataaattcagtcaatcagacttttttaaaattgttccaatagattttctaaaactatatttggacaaaatgatagagtcgggagatgttactgaatctagacaaattataaataaaattatctctgaaaattacacccctggcttaaaaactctaactaaatatttcatgttagcagatgcttcatgtcaaaaggtcaatgttccaaaaattaagaaggaaatgattttcattgttttaacacaagaattaaaagaggttttattgaaagaatctatgattaatgataaaataattgcatcaattgttaattatgtacgtatcaataatattgatttatttatcaaatacttacaaaaaagtcctgaatattataatatcacaaatattcctgatataatattcaaaagaatagaaaattcttcaacttatcaaaggaaatcaaatattcaaaaggcagtgtttttatcaagtataattgatcttttaaattttgatagatcaaaaatctcagatcaatgtaagcacaacctcattaatctatattcagatgcatcatctccattagctgttctttattggtctggactattaacaaaagctttatctggtgaagaaaaatcaaaaattttagatcaattgaaaaaagaatctacagaggaagatttagatatcacagagaaattgtaaaaataaataatgacattcttgttctatagtactataacttttttataaaaataatgaatattaataaactattttaggaacatctatcaacgaatcttttttcaatatcaactaaacatgaattgaatttgacatttttaacgacttcaatttgctttctgaatacatcatccttctttggttttgcaaatcctccaatgccgctaaaatcaggttgtttttgttgattttcggtaattgctctaccaccactctttagtctggttgaaatactaactaagaaatcagtttcaggattactaaacatacttgaaataccgaataatccagattttatagctttacttaacccttcaactcctaaaagattaacaaaataccaactgataccagtcacataagaaacatcgagatctggtgtagaaattgatgattgaaacatggatttaaaatttgatgttaaggcaaatggtaatttcaatacaatataaccacggaataaatgtgacatataaaataaaagtattggttgtggtaagtaattcaaaagatttgacttcataccattccaaaggaactcatgcataccagcttgactgaatggattttgaaattcttcattggtatcatcaatatctttactcttctttttattggtttttgcatcattggatgttgtttcttcaagaattttattcaagttggctggtttactgtataaatcaacaagaactgactttttactttcccattcatgattgactcaaacatgaccatgaattagtagtggaaataatacatcgttgtaaatgttgatcttctccgtactgtttccattttatccaattgaggtttaggtgaaattaacacagttaacatttctcgtagtatatgcactaactagcataatgaatagttattggtaacaaaacatgggtcttgaattttaggatctagtgtcagtattgtctcgtatgtcgacatgatgttatcaattgattaaaagagactgtcaatgaagagattcgattcaaaatatgactatgaattttcaacaatttatacaatgcacaggctataataaatttgaatttttcctcttaattgttaactcttttctttctacaaagaacaatgaagattcgtgttgcagcagtacaattgaactcaattttaggtaatgttgaagagaatatgaccaaagctatgaaaatgttagagcaagcatttccaacatctaaaccaaaaccggatttaattattttacctgaacttgcacttaccggatataactttaaatcaccacaacatatttcaccattccttgagtatatgggtaagggtaaatcatttgattttgctacggagatatcgaataaatgggattgttttacattattaggatatcctgaaaaattcaggaaatttaaaattaaatgaagataagatttataactcagctatattagttgattctaatggtaatgtaatacataattatagaaaaacacatttatatgaaactgataaaacatgggggtgtagtgaatcacctgaaggatttcaatcatttgatttaaatatcaaaggtaagaatattaagagtacaattggaatttgtatggatttgaatccttatgaatttaaagcaccatttgaatcttatgaatttgctaattttgcagctaaggaaaaatgtcaattggttttaattccaacagcatggatgaattctaattgggatgaaaaatggagtgatgaacaagttaaagcatttaagaaaatatatgattcaaattaatgaaattgaaatgaatttaggatcatgatataatgaaggatagtagaatattgtataatttaccatgatatgaaagatccaaataattttacaataaatgaagttgatggtagtactggtagatattgggttattagattgaatcctttatattccaaagaacatagagattatacacaatgtgttgtagtttgtaatagaagtggtatggaagataaattaatgtatgcaggtacaagtagtatgtactcattttttggaggagagatgaatacttcagatgaaggtgtttccattgattttaaagttgaaggtagtttaaagcaagggactgaaggagtcctttgtagggagctagaaatttgaattggtatacgaaaatttaagggtacagtatatatagatataaattgtttataatacaaataaaaagtttgagtcgtttagttgactatatgttacacatggtttgaaattttaagctgatgtttcagttgatgctttttcaggaattgcttcatcgttatgttcattttcaacatcttttgaaatcttatcaccatcagttttcttctggtgcatcttcagattcaaacaaattagctgattttgtttccaagttagttaattttttagaagctgaatctgattcttgatttgactcactgtgttcattttcttttgagtgtgaattttcttcaatttcaccttgttcttcttcttcctcttcgttatcttcttcttctagcattgtagttaattgttccatataagattcaacttgttttgaatttttttgatttgaaagaattgataaaaatgttttaatatgagatttttgttgttcaatttctctataagctttacttaattctgattttaatttatcatttgaaatagataattcattaattgcttgatcagttataattttttctaaagtccatttacttaataaagcttcttcattatcttttaatcttctaatatattcagaagctttctttataatttgagctttatttgtatgacttgttggtactaaatcttgtaattctttgatagcattattaattgtttctcttctacgtctttcgaacttctttatgatttaattttttcattttaattattgccttttgagatatactttcagaatcatcatcctttggtaaatcttccgaatttaaagacagtatatttttaacagcctcagaaacagaatttttatcatttgaaggatcaagattattaatttcaggatcaattgaaggatcctgctaattcagttgagccatttttttcattagattcatcatctgcttttccttcactattttcggcagctttagatagttctttatcctccgcttctttactttttcagtttccttatcattagtttctttatctccagatttatcctccactactttatcttcagttcctttacttaccgtttccttaccttcggtatctttatttactacgccttcattatcatctttgctgttgttgttattattgttttttctcttggggttcagtagaagtattatcatctgtctccaattgaatcttttgcttctttgctaaatgttcagcattaacatcagtttcctcttgatcagggacttctcttcaaatcggttgagttacttaccatcctttgaatcagtattacttacttgttcaagcctccaggggaagaatcaaaataaaataaaaatcccagagcacgtgttttcagaaaaaaatttttaaggcaatgctttgctttttatagagttttcaaaagagcgaattctcagtatttttcttatttttttttaatatgagagtatcacgagacttaaatttgaattttcttttattagcgacagtcattttgttgtgtgcttgttagaaggtcacgtgaaatgttgttttttaaaataaatttattattttaattttttgtgggcatcgctttagttaccaagggaacactgataaatcaccattaatcatcattgattaagcttaatcattgaattatcatactcttattttaataaataacatgtgtagacctgctgtttgcccttcttgtaataaatctacttggattggatgtggacttcatattccagttgctatgagtggtgttccaactgatgaatattgtacttgtggtcatccagatgactcaacaacttcaagagattatcctccaaaagttggtactggtattccaaaatagattcaatgataatataatttaatataataatttttatataacaatatagcatagtatattacttatttatataataaaataaaataatttatttacttataaccaattaattaattaattaattaattaaacttctaaattaatctataattatttagaacgtttgtaaattttcttaaaaaatgcagttaaaacttcactcttaaaacctcttgattcatcaatattagaaatcttctcttttaattcagttgcgattttttcttcatattgatgatataattcatcaatctttaatttactgaaaagttccttacaaattgcttcctttgcagaatcttttctaccataattttcatctaaaatttttctctcatctggtgaacaaattttaattgctgtattaataacccatgaacatttattatcttgaatatcagtaccaattttaccaatatcttctggtttaccaaaacaatctaaataatcatcttgtaatttgaaaatattcacccaatggaatcaaaacatctctagcttgctttaaatctaattcatcattaatacctgccataaacattgctaatgcaactggtaaataaaatgaataaaatgcggttttataaataacaataaatgagtgtttttcaagtgaaaatttacttaaatcaacatgatcttcaggtgctgtaattaaatctaataattgacccatttcagtttgaaatgtaacttcatggaataaatctaataaatcaatataatatgaatcttttctaaaatatttctttaataaaatataaattgcaccttctaacataaatgcatcattaattgcaatttctttaacaccttcaactctataccaacatggttgtcctcttcttgtaattgattgatccatcatatcatctgcaactaagaaatatgcttgtaataattcaatacaccaacctaaaattgctgctctcttatattctgattcactaaaatcatcataacttttataacctttcagtaaggcatatgtatcaacaactgaaatacctctatttagtttaccacctggtgtattatattctaaatttttttgaaaccatgaaattgcatcatttggcataccattttctcttaaaacatcaagtaattctgtaactaattctgggaaaagttctaaaaacttcttcttacctatttccttatccattgtttgattgtggttattccttaattgataaatcaatgaaataaaagctgagcaatttgatgaattatgatcttataaaatttaatgttgatttttcatgttcctcataatcaaccgttaaatttatacgacaactttatacgacatttaaaaagtcgcgactcttctctcttttaacggatgaaaaaaaaatttacatgaaaaaaaaattgaaatttattttttttacaatattaaaaattaaatttcactgaaaattttctttcggtttgatcttagataggtggattataaatagttctttttaagtaaaagtacagataaattttcaatggctgtaaagaataagggaaattctgttgctgaaaagcaaaaggtgaaaaatgtaaaaccttcaaagaaagataataaaaaaattgcaaagaaagaagaacctgtagcagaggttttagaagttgaattagtagaagaagatgatgatgaagatgatgaagaggaagacagtgaagatgaaagtgaaagtgaaagtgaaagtgaagatgaacaagaagttgatctcaatgcattaaatgaaagtgatggtgacgatgatgatgatgatcttgtaaatccaccagttgaaatagaatctcaagaacaagatgatgatgaagaggaagatgaagatgaagaagatgtgcccctttcagaagctgagtttgattcagatgcagacgttatttcacataccaaacttaccgttaacaataaagttgcattaaaagatgcactttcaagaatacaaatatcatgggataaacttccatttgatgaaggtcaagcattaacttacagtcaaactgttgaaactgaaattagagatatttatgatgatactgaaagagaattagcatttttcaaacaaggtttagattctgcaattgaaggacgtaaaagaattttagcattaaaaattccgtttgcaagacctgttgattattttgctgaaatggttaaatctgatgaacatatggataaattaaaggctaaattaatcagtgaagcaactgaaaagaaagcaagagaagaagcaagaagacagagacaattaaagaaattcggtaaacaagttcaacatgaaactttacaacaaagacaaaaagaaaagagagaaactttagataaaatcaaatcaatgaaaaagaagagaaagaataatgaaatgggtggtgatgatggttttgatattgcagttgaagaagcaactaatgttggtaatgataaacaaaagaataaaaaacaaaagattcgtcaaaatgttgcatcaaaggcccaatctaaaactaagagaccaggtaagaatagaagaagaaataagaagaaataatctatttcatttagatataattttataaattgaacaaactgtaaattatttatatacgacgtacgaaaaggatacttcattttctttaaactaattcaagttctttaagcatattccatgtttcattactaacatatgaacttaatgaaacttcgtaacttaaacccttacgtcttctagtttttaacatgaaatctctagcagtagcatttaatggaacacgagtaagtaatggaataaagacagtttcatcaaatggatttcctggaacaatatcccacttattaaatatcaattgtggatatgccataccacgagttgatagccttaaatctgtttcaattccaattgattctataacaggaattagtcccatgactttccataaagtggtgccttcgatcttatcctttgatataacatgacctcttcttctatcaatgattttctctaaaacattaacaacatcagatttacaaatcgactcaatttcatatactggttctaataattttggatatccaatcaatatggctgcatgacatgctttcctgatcatttgaataagttgtgaatcatttctatcagattcttcatctgctagttgaataccaattatcttaaatctaacatcattaattggttcgttacataaaggaccttcggaaactgcccattgaaatcccttaattatagcatgtttatgttcctttaacaaatttttatcgacttcatcaggtaaagtatcgtcacataacatactagttcctaaatcatcagagccaatactccagacagatctagctgcaaatgaatcccatttgtgtttatctctcaaaacttttagcaatatttcttgatgaatcatttctaatgtctaatattttacttcttaaatcagatgataattctggttcaagtggttctgcaataattgatactgaatttttattgttattagaatagaatagttaatcttaactctagatgtaccatcggcagtttcattgaacttcaccattggatcgctgactttgatttcaataccactatataaaattcttagatcgtgtaatagacaatccatgtaaagttcaccatatcccaatatggaatgttccccattatcttcaactttgacttcacagccaacatatgatctatttaattttttcaaagattcaataaattggtttaaatctttaggattatacgcttctacagcaactttaaaaacaggtggaaacaacatatcattacccttaattatgaataagggttctgttaatgattcatcaaatattgttgcagttttaacaacaaaattatctaaacctgggcctgatataagtccaatacatcctgcttttaaatctttgacaataaccttatatctaccacaccacatataacatttatttattttttgagtttttgaatcatcgatgttattgattgaataattttcacctagtaactttacgctttgcccttgttttaaagttcctgagtatacacgaactaaaccataaaaatgttcactatcctgagtgtcaactaatttggtgatatgagcaattaaaggtccattagggtcacatttctttatatgttctgcaattaccgaatcccgtggtccagtgtaaaaattttttaacttattgacagcgttatcaattggagtttcaaatgtatccaatacactaactaatggtaatgatggtaggaccaaaaaatttgagaaataactccttcaaaaatggtttgaaatctaatctatagacagaacttttctgtcttaatttgaagtgagtttcaaaaaaatcttgtctatctttaggatctaatgaaagtgtatgtgtaaccattttataaattggtgaaagtatgaatttaatgaaggtccttgatttggctgatgaaacagggtttgatggcttggtaaagaactttttgttttcatagtatatatctccccaaagtttacgtgaaaaagattcaactgtaactttaagactaggtttaatattattactttcaaagtactttttttgtgaaaactctcaagagtaaatattgtgttgaatattgaagatgaaaaacatacattatttagttctggagatagtctaagtgtatcagtcaccgcatcatgatatgtattttgatattttgttatcaatgcattaacttgatcaatacttcttctgattttatagtatgcatctaatggaggtaatcgaagttcaagaataagacgatctatttttgtcagaataagaatcattctggtttttgtttttactgcatattcaattaccaattcaagtgatttggtaacactttcaagccacatcaacgcataatgcaacagtatctgctaatctagctgcaataagcatctcatcactaaaattactatgacctggtgaatcgatgaaatttaccacagttgatttatgattcatatcggggagtaataacgacatcactgagcttttaattgttattcctcttttcacttcaagaatatgattatcggtatatctaagtctattatctttagttgatttacttctgttagtatctttaaaattatgtgtttgttttattaacatatcaagtatcgatgtttttcctgcatgaagattaccacaaagagcaacattgcgtattctttctgttatatttgataattcccacatatattgtttagtgtatgatgtttctggtagagtattttcttcaatcatgaattctttaaccacattcggctgtacaataggatcattaagactttttgcatctgatgttgctataatcgtttcaacttcgtctccaaaagtatttgagagtgttggattcattgatgcatcatctgctaatataattttatttgattttgagctatcttcaactatttcatcagtcattgaaacatctgaatcactatctgatgaagaatctgaatcgccatttaaagggtttccaaattcatcaaacaacatttcattttcatctttactcatctttcacaactattcttttcgttttctctatactaaaataggcagattatgtataatcattattcaaacactgtaaattggtttgttgacagagtttttgcaatgtgtgcatgaaaattatttaaaaatactgatatttaattacgtaattgtaaatagatttatgttaagattacgattgttctatactttaaaaagactgtacacaagagctgtgatgtttgctatcacaaacatgtattcatagtaaataatattatcatttaaatcaaaacaacccactatttatgatccattcatattgacataaatattaaaagatttatcctctttgtttaaaagaaataaacggttaatcaataatgtccattcagaataagaatatggtgaattagagatataaaatggacctgaatacatcattcaatgattttggacaagttaggttgtaaaacttgatttctagcttttcagatgatgagtcagtagctgattctacagcaaatatcttcttatctgatatacttttcatatttaaagcaactctgcctgaccatttatagtcatcgtaaatcatgtgcaattcagctttcttgccatgtatattaatagaatagcttaatagtgattctgtagttgacacaatagcataccatcttttatcttcatctgaataaatagtttcgacactacaaattggaacctcgagctcgactttaaatgtttcatctctgttaaatgtaaatgacaaagtacccgatctagttccagcggcaagtttgtatttgtcaaaaattgaaaagcagagtatctcatcttcagttgagtatagttcatgaatgccaccattccggtgaaatcttttgattttatattttgaattagttaagagtaaaccaaaactgccacgcatcaatgatggaattgtatctccaaattcaaagacacattcggcggatgtgattctattcacgtcatttaagtgtacgtgatcctggagcaagaaatgcaagtctagaagagacatcaaattccccataacatcttgaatacttattgctagttgtaatttctaactgatcctctaaataatatgtttgtttttctccttctggtgttgaggtatagaaagtgtatgcggttaaagtatcatagatatcattttgttgcttatcatcgttatatagagaaacattggaaaggattacatttaaggaaaatccagatattggtttctcagtgtctaatataaatttacattctaattcagtcatctgaaaagatcccacatccaaaatatctcttgaatgtttccttaataatggtttatacttgttgggtataaatcctttcaatttggcttcttctttcaccctatccaattcagcaaaaaattgatcttgtttatgcttgaagtccattaaaaattcttgtgttttcgttagtgtatctaacttttgtcttttatgtgactgactcacaatattatctatgtttttaatagcttctgattctgaggatagttgaatttcttgaatttggaatggcataatatcgaccagtttcttcatcgtaataaaatccgggtatttctctaggtggcatactgttgcctaattgtgtatatgcaaactaaagtaaacttattaaattaaaaagaaatccacaatgaaacttcatagagaaattcatgcaactgtaaatgattcgcataagaataattttatcatggcactctgctagcactagcctggttttcagacctctttgactgatacatgtcttctttctgaaggtttaacattcaatatatacattgaggataactgattattaactaaaagttcataggatgggagtgtatgataaacttcaagctccagaaatagaaaatgtgccgactgaaataaacacagaagaaacggatactacgccaaatttagaagtacatcatcaatttcatattcctgaaaatatcattaatatagggcatcaaattgcgcaggagatatactatgacgatgataatgaagaagagattcaacattttgaatataagagtgaactagaaaagaagttctcggtaggatctatagtgggattaggattttcgttgatgaatgttccctttggagtagcttcaacattatccattggattggtttgtggatctaatgtgacaattttctttggatggatattgtttggctttttttccataatgatatctttatcattgagtgaaattgcatcaaagttcccaacatcgggtggtgtgtatcatttttcatgtattctagcaaacgaaaagtacagtttaatcacttcatggtttgatggttggtacttgataatcgggaatttattgatgtttgtctcatattcatttggaggtgctcaatttattttatccactttaggtttgattgaatcaggattataaagaaaatagtatacttataatgattgtattcagtattgatcatcttgatctccaccgtcataaacataaaacttcagcatattttggatagagttaatgagatttgtatttattggactttctacacagtcttaattgcagatgtattgattttactattctcatctgacttccacagcttcaagtatatctttacacattttgatgcatcaagatctggttggccaggactttgttgcatttataataggtggtatacagttctcttcaatgacattcaatggttatggggcgattgtttcaatgagtgaagaagtgaattttcctgaaaagactaatacccaaaggtttgatatactcaatatgtgcaagtactattacaggtttaatattcatttttccattgctgagtgtattgccggaactaaataggttattagatgataatcctgacatttttccaattgatattcttcttaaattatctacaaaatcatttattgtctcatttttcatatcactgatgattattggtgctattttctttgcaactattggattcacttacaacatgtttccagaactatatattcttttgggagagatcgtgggctaccatataattcagttttacaacaagttgataccacagctgatgcaaatcatgttcctaaaaatgcaattctattagcatctggattttctataatcttgggttcattttcacttatatctactagtgcttttaatgcatttttaggttgttctgttatggctatgaatattgccaatggtataccctatcctctgctccctcataaataaaagaaaaaaaataagaggagcaccatttaaattgaggaaatttggttatatcatcaatatagcaagttgctttatgattgctttgacgtgtgtgattttatgtttcccaccatctcttgatatcgatatccaatcaatgaattactcaattgttgcatttgtaatatttacaatatcaatatggttaggttatcacttttggggacgggataattttgttgggcctctcttaactgcatcgcattcaaattcagctactgtggagttggatgttgttccagttagtaaaggtgatagcagtttggttagtaacgataacgtttgaaggactccatccaatcaaataaaatgaaaaaattcctttgctgtcccaaataggaaagaaagagatggttttcaataagccatacaaattttatagttttctatgagcctgccatacaaagtgcatttcatatggcgtagaatatttacacgtcttcaagctttgtaactttttaaccgtcattacttacttttcaacaatatagattctctgggtatcaatctaattacctgtacaaatgtgaagactattcctctaacgttgtaatacatgaaaatcttgacttgtatatatcatatgcttcctctattagaggtgttgataataattggggagatctgagcatcattatgcacaagaagtgaaatttcagaatttttattttttcatgtttttttattgttcaggttaactactactagtttatttttatttaaattttctgtcgttaagtagttcagcaaaaccattcttgtaaatatatacatcaaactaaatatgatgcttcagagaggtatacgagcttgctttactacaaataaaagcttgaacgtatatggtactgtaagtcgaagttttagcataacttcttcagtgtctgcattcaagagaccatccagattcaaaccaatcaaagaagaactaaaaattgaggaaaaagaagataccaaacaagaaatcaaacagaagacgcaaaagttcttcaagtatatcatcaccaaagttaggttaaatcaaatcaatcagataaatcttccatctcagaactcattgatcaaaaggttaatgcaaagttaaatgaggaaaaaaagcaaaaaaactctaaagttccaaaacctgtcaataattcaaacaataaagaagcaaaaaaggatgcatcaaaagtacctaaagatgacaagaagaacatcgattccaagtataacaaatcaaaaaatgaatctaaaaataaaaagtcattaagcaatgataaatttgataataaaaaagaatcatcagaatcctcaatgaaggttatgaaagttaagaaaagaaaagcaccagtcaaggcagatggatccaaatataaacttgatattcccacatttttatctgttgctaactttgcaacaattttaaaggttagagttcctgaattacttgaaaagttagaggaacttggatttgaaaatataacaaatgaacatattttaggatgttgaaactgcagaattaattgcacaagaatatggcttcgaagttaatcgtgatgataatttaggtgcagatcttttccctgcgactttatcatctgatcctaagaaattagttccacgctcacctgttgttacaattatgggacatgttgatcatggtaagacaactattttagattacttgagaaaatcatcaattgtcaaaggtgaatttggtggtattactcaacatattggtgcattcgttgtgaaaactcctgtaagtaagaaagaaattacattcttagatacaccaggacatgctgcatttttaaagatgcgtgaaagaggtgcaaatattacagatattattattttagttgttgctgctgaagatagtgttaaaccacaaaccattgaagctattaaacatgctaaagcagctggtgtaccaattattattgcaatcaataaatgtgataaggaacaagcaaatcctgataaggttgttgctgatttatcaatgcaaggaattgatgttgaagattatggtggagacactcctgttgttagagtttctggtaaaacgggtttggggatgaaagaacttgaagaaaccattgtgactgttgctgagcttttggatttaaagacggaagaaaatggtgttgttgaaggttgggttttagaatcacaagtcaaaaaaggtttaggaaacgttgccacctttctagtgaagaagggaaaactcaaagctggtaccattattgtttcaggtactacattctgtaaagttagagttatgaaagatgaacacggtaaagttgtcaaaatggctaaaccttctcatcctgttgaaatttctggttggaaagaagttcctgaagctggtgaatatggtattcaagcaaaggatgaaagtttcgctaaaaaggttattgtaaatagagaaaaaagacaaagaatgatggaagaagcctctcaaattgaagagatgaatcaaaatagaatcaaggctattcaagattctaaaaagaatgaacagatacaggcttaccaaatgcaagggttaacacttgaagaaattaaagaacttgaaccaggaactatttgatgaagaaagtaataaagttgaaatggtgaattttattattaaagccgatgttagtggttccgctgaagctgttaaacaaagtattgaaggtttaggtaatgatgaggttaaatcacatgttatttttgaagatgtcggtgcacctactgaatccgatattgctagagcaagagatgcaaatgcgcatgttttagcctttaacgtcaaagttccaaaagaaattatgaatactgcatccaaatccaaaattacgattaaggaatataatgtcatatatcatttgattgaagatgttcttaaaatcttaacttccaaacttcctccaatttacgaaaccaaggttatagccaaagtttcaattaagcaattatttgaaatttctctcaaaggtaaagaaaaaatggttattgctggttcaagagttacggaaggtactttcaaaagaaatcatgaagttagattgataagagatggtgacactatctatacaggtaaagtcaagcaactaaagattgtaaagaatgatgttaatgaagtattaaatggtggtgattgtggtatatcattagaaggtgatccagaacttaaagaaggggatattatcgagtcgatagagaaaattcctatagaaagacatttgtaaataaatttaatagattcaacatgtatattaaatgtttagaattctgtacatataatgaggcatataaatataataatataaatggaacaggttaatctttttccgaattataacgactattgtctacaatctccttataatttagaaagatttttctaagtaaactatgatctcccaaaaactcaacttttttgtccatttcatgctctaaatgttttataaacactcttctagaatcatgaaaatggatactaaataaaagccttattaaatatgagttatatttattatcactattttcataatcaaatatcaagtattctagtgttgagttcttcaaagacaaaagaaaaagtatcaatttctctatcttcattctatcaatcaaacaatcattaatatcattaagtgttttcttaacatatgctagatcttcttcaccccatggaacctctttatgtaccatactatgcatcacgtgtaaatcatgaacacttgaagaatcagacccaacatcattatctgaatagtgtatgtttgggttacctgaactggtaacattatgattgttacctctataaggctcaattgaagattctttgttatctgttctacgcttggtatgtttatttttgcgagtgtgtctatgaacatgattgtaggataaccgtattttatgaatggcattcaattcattttgtactttattgtttaattttctgattaaatgatttgaattatgatctttatctccaaaattggataaaacatgaacagcttcctcaatcccatcattgttattcaagggtatatcgtgagagctatgtggtttctgtgcttctccactaaactgtactacattttcatcatctgtttcatctcttccttcttcatcgcttgaaatgtctaataaagcgtcatcgatttgttctgccattcttatccatatccttcgacgagcaaaatttccaaacttaccaactccagtccagtgataacttccaaatctaagtttcgaataaatccaaccttcctcatcgacatcattaatcatcataacatgccattgattccaagaccatttccaattataagatggttcagggtacattgacaaatcagacaaatttctctccctttagtgtttgatattttggtggatccaaaggatataaaactgactctttactataatactttgacccaaatacagttgcacctctttgattttccacaatgatttcataacttatggatggtgaagttgcattcaatttagatttaaactttgacaattttttcaaggtttcgtagtctgttgtaaactgagataaacatttcaaaaaatcgtctcttttattgaactgaggtaaccttgtaatatgatcgtccatattatcataatgggttatacatttttcaatcattgatttcctatctattgacaaaccagaaatatgtgtaatctgagaagttaactcttcttgtgacaattgattattacttccattattattatcattatcatcatctgaatatacatctatcgattcttcctccaaactactgtcgacttcggagttatatccgttgagatcgtctgagatttgatccacattacctgtattcaattgcgtcggcacctttaatagtcctgatctttttgagctgaataccggtgtggcatcggtcattaatctttgttatttctattgtgtatcttcaaagttaattctaaagaacttaatccctgcttcttggaacttcccccatgggccttgtagaaagatttccccttttcatgtaaaaaaccaaatcaaagaaaagcactttgcagagttcgaacgtacacactgaaaaaaaactcgcgaatgtaaatcccagcattaatgcattttttcaaagtttttcactgttgatgttgtttcactaaactgaaatttttgtctctgtaatggtgtctcaaatttaacctaaacttatcgtagagttagttattttgtgtaatatcctttaatataataaaataccagtaattaattatggctgcttctgaaattgttgatcttgtttcatcgagtccttcagaagatttggaaaaatccgattatctcagttacgaagatcaaacagagaatgttaaaaagcagtttgtattattgaaggaaaatcaatatattccaagattgaaaaatgtatactctgcaagtaatgaatttatgacatgtgattgtgatgaagagtatgaagatgggcacaatatggcatgtggtgaagattctgattgtattaatagattaactaatattgaatgtgtaaatgatcaatgtaattgtggaaataattgttcaaatcaaagatttcaaagaagagaatatgctgatttttctatatttttaacaaaaaataaaggatacggtgttagagccaatgttgatatacctgcttatacattcattattgaatatatgggagatattattgatgcagctgaatataaaattagaaaagaagcatatgacaaagaaaatattaaacatttttattttatgcaaattcaagataacgaaattattgatgcaactaagagagctagtctggctagatattgtaatcattcatgtgatccaaatgcttacattgaaaaatgggttgtcaatagaagatttagaatgggtatatttgccaaaagaaaaattttaaaaggtgaagaaatatgttttgattataatgttgatagatacggtgctgaacctcaaaaatgttattgtggtgctgcaaattgtttaggtattatgggtggtaaaactcaaagtgaaactgtaagacttttacctcatattataacagaagctttaggtgttaaggctgcagatgagaaaaaatgggttaaagaacaaaagaaaaatggtgttaaggtcactacagataatattgattcaaatgttaatgttgaatttgttaaagcattagaattacaacctgcatccgttcctgaagttgccaaaatttcaagttgtttgatgcaacctgatttagatataattgttattgattcaattttgaaaagattattactctgtgatgatgatgaactggctgaaattttagctcgttttaatagatttcatggaattcaagctttaggtaatactttgaaaactattattaatagttcctctaatagaaaaaaactaaatagtgaagaaaaagatatattattaggtattgtctatatacttcaatgctggccaactttaaaatctaaaaatgcaattaatgatagtgaaatagagaaaagtttggaaattttaaccaagaaaggcataacggagaaattaaacaatgatattacaaaattgataagcggctggtctgaccttcaagttgtttatcgtatacctaaaaaacaagaaccaactcaatctcatattattttagatgatagaagaagtcgatcgaatgatagacaagcttctcctgttgttaaaattcctaaaggtcctgcttctgcaacaaagcaaccttgggggaatctagatatctcatctttaccagataatagaaaaatagatgaaattccattaccatttggttgggaatgggcaattgatgaatcctccaagaatagatattattataatagagctttgaataaaacacaatggattaaacctgaatggaaaccgattcctgatgaaagtgaggaggttcgtagacgaaaagaaagggaaagagaaagagagagggaaagagaaagagaaagagaaaggtatagagaattgcgtgaacgtgaattgattgaaaagaaaagagcaatgtttagaagatctgaaatgagacaacaacaggagaaattaagtatgatatctagtattattgcagaagcatctaattctgataataatgtagatgatgtaaaacaaaagaaaaaatcagctttaaagtcttcttcaaagtcaactcatgatcgtaaagatgtgaaacaagaacatacaaaaactgcaaagattgtttcacctaaagatttagaagcaaaatggacgaaactttttgcatcatatgttccaaatgctttgagaaaatatgaaactgatataggtagagaaaatttaaaaaattgtgcaagggatattgttcatttattagctgataaagaaactaaaagacatagtggtgaaagtgttcctgttacgatatctgaggagcgtaaatctaaaattaagaagttttgtcaaagctatatggcaagatttttagaaaagttggatgaaaagaagaaaagaaaattaaatgatgaaaatggtgataattttgattctgaatccaaaaagataaagtcattgtaaaaagtttattctcaaatgacttttttttaaaacaaaataaaattgaaatgtaatatactattttattaatatttttaatgatttctatagaagtgtttacaatatattgagattttcaaaatagttataaaaaattattttcttttcaattatattttaccaaaagcttcatcgacaatagaagctaaaatatcaacatgtttcttaccgaaaactaaagctggtcttaatctaacacccatgtcaccacaaccaccaatatttaaacctaaaactttacattccgctaataattggtttctgagagcagtagttggtaaatcaaatgcaataaagaaacctctacctttacctcttaaattcaacatcttacctgaatatttagtagaaatagcttcaagtttagagtataaataatcaccagcttctttagcatttgtcaaaagatctttttctttaatttgttcaataatagtttttgcaattaaagcctttgatggatcaccacaccaagtgttgaattgtctgaatggttgatcaccagccaagccagcttcgctgaagaagaaacctgcattttgcatctttttagagaaagtcataatatcaggaacgacatcataatgttcatgtaaccacattttacctgaaccaccaccaccagtttgaacttcatcaattatcataataacatctaatcttttagtaatttctctgataccttggaagaaagctggggatgcgtgattatcaccaccttctgattgaacaggttcaacaataacagctgcaactttacttggataatttttaatagtttcttctaaagcttttaaacatctttcttcttcagctttattttgagcttcaaattgatctaacggatatttaagagctgggaatggggcctttggccaattgaatgctggaatatctaatttatgaattgcctttgatctagttgttgataaagaaccaaataatctaccatggaaagctttttcaaatgataaaataaccatatcagatgtacccggtaattgattttccataacagaagttaattcttcttcagtaaatggtttattacctcttttcttatttgcttgaaacattaaagcagccttgaatgccatttcatttgcatcagaaccggtatgtgcagtacaaactttatctaaaccttttggagcaacagataataaacctttctttaagatatcataataatcagttgatgggaaacatgctaatgcaggtctgttacataaagcaacagccatttcatcagaatgtgcagttttcaataattccggattagttgtaacctaaagcaattgaagagatttgacaataagaatctaagagtttgtttccatcagcatcacagatatagttaccaatagaattgtaataatcggtaacgaaataagcagcctttgtatcataaacagtagataattcttcaagttttgccttagatacaggacctgggattgcagttttgatttccggagctgaaggttcggttgggaaataagtttcagagatagacattgaataataatagattccttttgacaaaagaagaagagaaaagttcaaataaaatcaaataaaatcaaattaaatttacaatttccatttcagcagaatctgatcaccttttatacacctaactcaacggctaggtgaacaatcaattaatgaacgataagtaaaatagttgaaataataatagccaaatattcattatcttgacgggaaacgaaacccgtttgacatattttctaattttctgattttctgatagtgatatatagtgagtgattcgatagcggcggcaatttttcacttttggatttcactttctgtatatgggttatccgactattgtaattagagagaagggttgaatgattcaagaattactcaaccactactacggagtgtatctttattctagctgttctttttaataagctgtaactcagctataaaacgtgtaacctctcagaatatgttaggaagagcctttataaactgttgattacgtaatttatcaaaagaatcgctctttgaattcaattaaccaacatgaagtttatcagtatttcatgaataaggatgttgccattcgaattcgttataatttagttacatatatcatcattaacatatcagagtagataaaatggatcagtcgttcttaagtgcaaataatgttgaactagatagtaatgcaacagtgctattaatgggtcttagaagatctggcaaatcttcaatctgtaaagtggtctttcataacacacaaccattagatactttatatttagagagtacaacaaaaccaacaacagaaaattttaaatcacttattgatttagctgttattgaattacctggtcaattgaatttatttgaacctgcactatacgattatgaaaaattgtttgcatcaattggtgcattagtttatgttattgattcacaggatgaatatttaagtgcattacaaaatttagctgttattataaaatatgctgtaagtgttaatccaaaaattcatgttgaagttttgattcataaaattgatggtttatcagaagattttagattggatactcaaagagatataatgcaaagaattggtgatgatttattagattatggactagaaggtgttcaaattagtttttatttaacatctatttttgatcattccatttatgaagctttctcaagaattgttcaaaaattaatatatgaattaccagcattggaaaacttactagatttattaatgcagtatagtaattttgataaagtattcttattcgatataaactctaaaatatatgttgctacagattcttccccagtggatattcaaaattatgaagtttgtgcagaatttattgatgtgtcaatcgatttagatggattatatgaatctccaaataatcgaaatagtttacaacaacagcaacaacaacaaatgaagagaaattcaattgctggatctttatatgatgatataggtaatgcaaaacaatatcaaaatagtgtatcaggtgaagaagttgatgtactaacaaattcaaaacctacaaaatgtatttcaaaacttgaaaacggtacagttttatatttgcatcaaatgataagaggattagcattggttgcagttagtcgatttgatgatacagatgaagcaacatcaatttcagttattgatcataatgttgctatatttaagaaaagtttagaaaaaatgtgggaacatgctaagtataaataatttaatcaagttttttatgtatttaagtaaatagattattaataaattattatagtttatcaatcatgttagctaaatcaatctcttggtagactcttagtaagtgaaaaactacataaactttttaaaaaataaacggtttaaacgacaactgcaggattcgaacctgcgcgggcaaagcccaaaagatttctaatctttctccttaaccactcggacaaattgccttttacaaagagtttttttgttatttttttcttgttgtctgtttcagattttttaaattttaaaataaaaaataaaaataaaaataaaaaaataaaaaaataaaaaataaaataaaaataaaaataaaaataaaaataaaaaataaaaataaaacaaaaataaaaaataaaaataaaaataaaaataaaaaaaaataaaataaaataaaaataaaaaaataaaaataaaaataaaaataaaaataaaaataaaaataaaataaaaataaaataaaaaaataaaaataaaaaataaaaacaaaaataaaaataaaaaaataaaaaataaaaataaaataaaaataaaaaaaaatgattgaaaaaggggccctaaaagctactacaatcgacgattcaggtcctcccgaccctcaaaacgttactaaaccgcccaacttaccccatggtgagttcaacaagttaccttcagtctttgctgaagaaaaagaaaacgaaggtttgaaccaaactgaccatgaaactcaagacgaagatgaagatattgaatttcaagattgcgctgaggaagatgaagtagtccaagaggtaaatgcagaacctcaaccaaccatgacgttggctcaaaaactccataaaacaattacggaggcaaatattacggttgataaagatcatctttatcacctttcatactttctaaaagttggcaaagatcaatttttagaccttgaaaaattacaagaaattttatcctctttcttaaaagaattagaaagaaatattaatactacaaatttagcagaaatgcacaaagagtttcaatttatctttgaagattatcacaaaagcaaagataacaacaacaataatactattaaaaataaaaaaatcaacaaagttcataataatatgagcaaaccaattgatgcaccaactgagaatacaatggaagaaggcgcaaacatgtttaatactgataaatacagtttaaaaattaacctaccattggctgaaccaccgatggaattattacaattagtttctaccatgttagtagaaacatttaattcatatgatcttaacttaatggatcaatcttttgaagaaaacaacacacttgttgttttaaaaacggagttccctcctttcatcattaaatctaaatatgatgaaattattaaaaatctctattcagaatacggagaaattatgtcttgtcaattaccacaagaaaaagaatccaaaatggcattcaatatgaagttctacgaacaaaataaaattatttacacagtgttaaaactaaaatcatcagttttaccacctaaaattcattccatctcacacacaacaggtggaaaaacacataaaatccccatcatcacttacttgtctactgcacctacacattgtgtatactgcagatgtacagaccacactacagctagatgtccaatgaaaccaagttgtagaagatgttacaaccctagacataaggtcaaagaaggtgaaattccaaagaatggtcacagagaaattttctgtccaaaatcatcggaggctgaacaagaaaggttatttaattccctccacccaaaaacaagagagaatttcttcaaaaaaactctctcaagatcattaccaatgtgggcattgagaattagaaacgcaacggttaatgatcaagtattttacgctcctgttactccaagaacatcaactacaaatggtaatgggaaaagaagtagagcccaaacctctacaaacattttaaatctagatgcagctgttgttattaataatgacaaagtagattcagatggcttctctattccatctaaacctaagaacttatctaggtcagattcatcatcatcaatagtcagtaacgttgataatgcggtcaatcctttccaagtattggaaaatgtggatgatccagaaattccaaatgaagatgaaaacatccatagtgatgaagagatagaagatatggttgttgaaactaagcatgccgaaactacaagaagtatgccaaaaactccaactcaacctagaaatgtcagaacattagttaaatcttctaaacaaggtaagagtgtagcaactggtacattattagatgctaaaaaaatagaaatggcattagaaagaaaagagaaacttgaaaaaaagaaatctcaaatggatttagactcacaagtctaattcatttaattcttcaagtttaataaaatataaaaatataaaaattaaaaaaaaaatataaaatatcataatgaataagttaaaaattttaaattttaatattcagaaggcaactagtccttctaaattaattcatattctaaattatgcaaaaaataaaaaaattcaaattatgtgtcttacagaatttgatctaaatcaatcaactgaattatcttcaattcaacaattattatccaatttcgatttcaaaattgcgattcaatctgttcaacatcgaacagcaattatttaccattcttcaatagaaatcatttcaaataatatttttccaaggcataatcgtgataatcaacttgcaaacttttatgtctgtgatataacaataaatttcaaacaagaaaacttaactatcatctctgtttatgtaccagtttacaataatgttaatgataacagattccactgcattaacaaaaaagattttattgacacattatgtccaactttatcatcattatctcgtggtgaaaataatctaatcatttgtggtgattggaatacacatcctatggaagcaacaaatttaaatcgtattgaatcatttcttcatcaacaattaatggaaaataatttatatgatattttcttccttccaaataatagaagaagtatatgttacaccaaccacggttcaaatggaacaaataatcggctagaccgtttccatgtttccttcaatctgctaagaaatatcaattttaaatatagagtacatcaaaagctcccgtttaaaaataaaataaaaaataaaaataaaaataaaaaaataaaaaaataaaaaaataaaaataaaaataaaaataaaaataaaaataaaaaataaaaataaaacaaaaataaaaaataaaaataaaaataaaaataaaaaaaaataaaataaaataaaaataaaaaaataaaaataaaaataaaaataaaaataaaaataaaaataaaataaaaataaaataaaaaaataaaaataaaaaataaaaacaaaaataaaaataaaaaaataaaaaataaaaataaaataaaaataaaaaaaaatgattgaaaaaggggccctaaaagctactacaatcgacgattcaggtcctcccgaccctcaaaacgttactaaaccgcccaacttaccccatggtgagttcaacaagttaccttcagtctttgctgaagaaaaagaaaacgaaggtttgaaccaaactgaccatgaaactcaagacgaagatgaagatattgaatttcaagattgcgctgaggaagatgaagtagtccaagaggtaaatgcagaacctcaaccaaccatgacgttggctcaaaaactccataaaacaattacggaggcaaatattacggttgataaagatcatctttatcacctttcatactttctaaaagttggcaaagatcaatttttagaccttgaaaaattacaagaaattttatcctctttcttaaaagaattagaaagaaatattaatactacaaatttagcagaaatgcacaaagagtttcaatttatctttgaagattatcacaaaagcaaagataacaacaacaataatactattaaaaataaaaaaatcaacaaagttcataataatatgagcaaaccaattgatgcaccaactgagaatacaatggaagaaggcgcaaacatgtttaatactgataaatacagtttaaaaattaacctaccattggctgaaccaccgatggaattattacaattagtttctaccatgttagtagaaacatttaattcatatgatcttaacttaatggatcaatcttttgaagaaaacaacacacttgttgttttaaaaacggagttccctcctttcatcattaaatctaaatatgatgaaattattaaaaatctctattcagaatacggagaaattatgtcttgtcaattaccacaagaaaaagaatccaaaatggcattcaatatgaagttctacgaacaaaataaaattatttacacagtgttaaaactaaaatcatcagttttaccacctaaaattcattccatctcacacacaacaggtggaaaaacacataaaatccccatcatcacttacttgtctactgcacctacacattgtgtatactgcagatgtacagaccacactacagctagatgtccaatgaaaccaagttgtagaagatgttacaaccctagacataaggtcaaagaaggtgaaattccaaagaatggtcacagagaaattttctgtccaaaatcatcggaggctgaacaagaaagtataagtaatcaatctgtataaaattgtatattttaatgaaattaatgtaaaaaaaaaaaaaaaaaaattttttaggaagcattgttttctgtttgatcaactgtatttaaactacaaaaagccttatcatgtagtttagtgggaaacaatatgcaaaacttaggtactgcttttgtaatatagaatttgaccggaaaaaaagtttaatctgaaaatataataattttatcatttttattctttcaacagcaccctaaaaaaaaattattcgtttgggagtaccaccacgagatttataaaatattatacatatatttttactcaaaaataaaaagtctggttcttattatatctaaattaaatgaaaaaaattatagattaatttattagaaatgatttacatttagttcagtttaaaaaaaagatatattgaaatgatgaatcataaataatatatgagtatatgtaattaaactataaattttgcaattataattgtcaaaaaaatattagatgatggtaaagaagttaatattttagaaaagtgttttggaaaagaagttcagttttgtattaaactgaattttaaatgatggccaaaaagtaaaattgcaataaagtttatcaatgcattaaagaaacaaaacaaatttgtcaaaaagcaaaataaaccaaacaaggacatacattttttctataaactagtcataaaatatattgtataaattaatgtgtaggtatatagataatacaactaatcatactttcactcaagcaaaataatgaccattttattattacaaaaacaggcctacaaatttctttctaaaaaagatgaaataagttttttcactcaacttaacttttaactatcaagaatcctaatatagccaagacatgcccttaaaatagtgattttaaaaaagtaaaagaagactgagtagtaaaaatatttatggtactttagtttgaggtttgttcacatggtttttttcttacattctgcctttttaaagtttccttactttttaacggtttattcaaacacttagatgaaacaagtttattcaaacacttaatttaaaaaaaaccaaaacatagttataatgtataaattttgaagatcttagtttggaaaaaaatgagttactaaactaaaacatatatcgtgtgatggtcactgtaaaaacttgttgctttacctatatagcagagcaaacaactatctaattgaaattagttttataatataaactttcaagaaattaaattatttaaattttatattaaaataaatttccagtttttttatgagagcaaacaatgatatctttttcaatggaacatacttagagaacaaaagcaatcaagtaaagaattaagaacattgtattcaaaaatattgaagtatcagcaggcaatttttttactcatttgctttcaaaaccagtatcttgcataaacaaaactgtaaaatgtaacaattttgaaagagcaaaaaaataaagaaaagtctaaaaattacaactaaaaaaagtttgaagtatctttttaatacaaaatcaattactttaaagtattattaaactttattgtgttgttatcgattgctgtatttaagaaaacaaattttttctaatttgaaaagccaaacttttactaactttcaaatgtaatgttacactgcactaaattcatcagttaattcaaaagtttaaaatcatgaatgctttaaactattataaaattttgggctaaagttaaacaaatttttttggcattgttccagaccaaataattcttatcttatctaaagtttattaaaaattgggagttgtataagcacttcaagtaaaagtgactaagaggtgttttaaacttttcgatacaataagattctgtatagttttgagagatacacagatagttgacaaagaaatctgtgtcaatcccaataataattgaaaaaaaaccttattgtcagtaaggcgtatagtaagtaagacatatgcactgctacgtcagaaaccttaaaatctgtctatatgcactacgtactgaagtttaacggcccaaattctatacataggattttctgaaacaaaatctgaaattagcgcgctatgacggaaccccgagatacgatcgatgcgcccataaaaactaatagtatagtaattgggcccagttatgatacataattgttataatctatatactcataatactatatatttctttttacgttttttttaagaaaggcatattgacatgaaaaaagttaatttattcatgtttatagcaaatgtatgtataatacataaatgtatacataggaattataaaaaatagaaaaggtgtaagaaattccactgaaagtgaagacccagccaagaatttctcttaaaatatttagggcatcgtgcataatttcaatttctcggtttttaacttttctttatcgtgtgtattgtcaatttgttcttcaatgcatctcgattttctcaagaaatattttattgcgtcactaaaaagtttaaatctactttttggtaattcagctttctcttttggctttatcgtgctaggtatctacaatttagcttgtgttcaattaaaaagtttattttcaatttttataaatttattactaaaaaagtttatctttcatatatctatgttacaaaacacaaattcgtttattttttgcaattctagctagttatgaatgttgttttaccgtgtaattttgatagcaatttaactttcaataatttaattataccaatgttgcttttatttttcgaatacaaacaaccaaataaaatgaaaaaccatcttttttatggtataaaaactagaggcaatgatgcattttcccaaaaattacttctcttaacttatatttttttactatcacattctttgaattatctataaacaaaaaaaaaaatctttctctatgattgtcaactcaagtttttgtttggcatttttgctgtcgttatttcaagtgacagcagccgtcgatgtttatggacaatcaaccactgcaattggtacttccttggttctaaaagatacagctcaagttcaaacaggttttgcagctaaattttatgattatgatgcaataaatactgcttctctttataatgacaattggatcgccaatgaatacgcaagtttaccagttagcgcttctgtatcaagtatcacagatccaaatttttcttttggtcctgttgtttttgcacaaagtctttatggtgtaacaagtgtcagaatgcaaaaagttttaattgaattagaaggtttttttaaacgtaagtatttaaaatttcaatttttttttactgtctttaacattatactaactaagttttttctattatagctgacgaatctggtgtttatacggttactttagactctgttacactaggtgcttttttatggattggtgatggagcttttaatgtttgctcaaagacaataccaaatgacgcatatcagaatgttttattaggtctcacagatacaacttctcattcttcttatgtttatcttgaaagcggtacttattacccaataagaattatatactataatataggttttgttggtccaagtatgaatcttcaaattgtcagcccttcaggtcttgtttacaacaccttcaacaatgttgttaactttaatacttccaatattaatgaatgtgaaagttctcaaaatactgaaactctttcggtttctctctcaactgattcttcaagtgctccttctgcaacagcttcttcccctccttcagattttcatatttccggtgcttacagtgcaacaggttgcgctcttcaaacaaatgatgtgtctttaacagctggttttcaagcaacattttacaattatttattgttaaacgatctttttgattatcaatatattgctaatggttacaccgtagctccaattattggtagggcaaatagaatcacaaatccaaactactcagttggtttaattggatcaattttattatctggaatttacaatcaagtcacggtggctgcaggtctaggttacgtcaatgaattgactggttatttttatgcaaaagaaagtggtacttacactttcaatcttaacaatgttgatgacgctgcaatggtttggtttggtaataatgatgctttcacttgttgtcaacctggtgtcattccgggtggttctgtaagtggtgcattattgtatagttacggacatagagtttcagttaatgttgatcttgaggctggtaattactatccaatgagagttgttttgcttaatgtcgttggaacatctgaattagattttagtgttatcaccccagcaggaactgttttacacgacgattggacatcatgggttttctcaatagcaaatactcaaaataatgtttgtgatacttctgaagacaccagtagcagcattacatcaggcacccctagtacaaccccaggtgctgcatcatctaacacttcaggtaatgattcaactactacatctggtaccgcatcatctaacacttcaggtaatgattcaaccaacacatctggtaatgattcaactactacatctggtaccgcatcatctaacacttcagttaataattcaactactacatctggtaccgcatcatctaacacttcaggtaatgattcaaccaacacatctggtaccgcatcatctaacacttcaggtaatgattcaaccaacacatctggtaccgcatcatctaacacttcaggtaatgattcaaccaacacatctggtaccgcatcatctaacacttcaggtaatgattcaaccaacacatctggtaccgcatcatctaacacttcaggtaatgattcaaccaacacatctggtaccgcatcatctaacacttcaggtaatgatgcaaccaacacctcaggtaatgattcatctaacacatcagcatcatctaacacctcaggtacagattcctctctctcaactgattcttcaagtgctccttctgcaacagcttcttcccctccttcagattttcatatttccggtgcttacagtgcaacaggttgcgctcttcaaacaaatgatgtgtctttaacagctggttttcaagcaacattttacaattatttattgttaaacgatctttttgattatcaatatattgctaatggttacaccgtagctccaattattggtagggcaaatagaatcacaaatccaaactactcagttggtttaattggatcaattttattatctggaatttacaatcaagtcacggtggctgcaggtctaggttacgtcaatgaattgactggttatttttatgcaaaagaaagtggtacttacactttcaatcttaacaatgttgatgacgctgcaatggtttggtttggtaataatgatgctttcacttgttgtcaacctggtgtcattccgggtggttctgtaagtggtgcattattgtatagttacggacatagagtttcagttaatgttgatcttgaggctggtaattactatccaatgagagttgttttgcttaatgtcgttggaacatctgaattagattttagtgttatcaccccagcaggaactgttttacacgacgattggacatcatgggttttctcaatagcaaatactcaaaataatgtttgtgatacttctgaagacaccagtagcagcattacatcaggcacccctagtacaaccccaggtgctgcatcatctaacacttcaggtaatgattcaactactacatctggtaccgcatcatctaacacttcaggtaatgattcaaccaacacatctggtaatgattcaactactacatctggtaccgcatcatctaacacttcagttaataattcaactactacatctggtaccgcatcatctaacacttcagttaataattcaactactacatctggtaccgcatcatctaacacttcagttaatgattcaactactacatctggtaccgcatcatctaacacttcaggtaatgattcaaccaacacatctggtaccgcatcatctaacacttcaggtaatgattcaaccaacacatctggtaccgcatcatctaacacttcaggtaatgattcaaccaacacatctggtaccgcatcatctaacacttcaggtaatgattcaaccaacacatctggtaccgcatcatctaacacttcaggtaatgattcaaccaacacatctggtaccgcatcatctaacacttcaggtaatgatgcaaccaacacctcaggtaatgattcatctaacacatcagcatcatctaacacatcagcatcatctaacacatcaggcactgcatcatctaacacatcaggcactgcatcatctaacacttcaggcactgcatcatctaacacttcaggtaatgattcaactactacatctggtattgcatcatctaacacttcaggtaatgattcaactactacatctggtattgcatcatctaacacctcaggtaatgattcatctaacacatcagcatcatctaacacatcaggcactgcatcatctaacacttcagttaatgattcaactactacatctggtaccgcatcatctaacacatctggtaatgatgcaaccaacacctcagcatcatctaacacatcaggtaatgattcaactgctacatctggtaccgcatcatctaacacttcaggtaatgattcaactactacatctggtaccgcatcatctaacacatctggtaatgatgcaaccaacacctcagcatcatctaacacatctggtaatgatgcaaccaacacctcagcatcatctaacacatcaggtaatgattcaactgctacatctggtaccgcatcatctaacacctcaggtaatgattcaactactacatctggtaccgcatcatctaacacctcaggtaatgattcaactactacatctggtaccgcatcatctaacacctcaggtaatgattcaactactacatctggtaccgcatcatctaacacttcagttaatgattcaactactacatctggtaccgcatcatctaacacctcaggtaatgattcaactactacatctggtaccgcatcatctaacacttcagttaatgattcaactactacatctggtaccgcatcaaccaacacatcaggtaacgattcatctaacacatcagcatcaactaacacatcaggtaatgattcaactgctacatctggtactgcatcatctaacacctcaggtaatgattcatctaacacctcagcatcatctaacacatcagcatcaactaacacctcaggtaatgattcatctaacacatcagcatcaactaacacatctggtaatgattcaacttctccatctggtaccgcatcatctaacacatctggtgctgcagcaactacaatttcaggtttaggctcatccagtactcgttcaacaggttcccttgtttcaaacttcaatggcacatccggtactgcctcagctaacacttcaagttcaggttctatcagaccatctggtgccggtgctggttcaaacgcgacaaccggtccagattcctcaagttcaaatggttcaggctctaatggcgcaggttcaggttcagcttcaggttctaatggttcaggctcgggttcaggctcaaatggctctaactcaggttcaggttcaaatggttcaggatcaggttcaggatcaggttcagatgcctctaattcaggatcaggttcaggatcaaatggttcaggatcaaatggttcaggctcgggttcaggctcagatgcctctaattcaggttcaggttcaaatggttcaggttctaatggttcaggctcaaatggctctaactcaggttcaggttcaaatggttcaggttcaggttcagatgcctctaattcaggatcaggttcaggttctaatggttcaggctcgggttcaggctcaaatggctctaactcaggttcaggttcaaatggttcaggttctaatggttcaggctcaaatggctctaactcaggttcaggttcaaatggtttaggttcaggttcagatgcctctaattcaggatcagattcaggttcaaatggttcaggttctaatggttcaggctcaaatggctctaactcaggttcaggttcaaatggttcaggttctaatggttcaggttcaaatggctctaactcaggttcaggttcaaatggtccaggttcaggttcaggttcaggttcaggttcagatgcctctaattcaggatcaggttcaggatcaaatggttcaggttctaatggttcaggctcgggttcaggctcagatgcctctaattcaggttcaggttcaaatggttcaggttcaggttcagatgcctctaattcaggatcaggttcaggatcaaatggttcaggttctaatggttcaggctcgggttcaggctcagatgcctctaattcaggttcaggttcaaatggttcaggttcaggttcaggttcaggttcaggttcaggttcaggttcaggttcaggttcaggttcaggttcaggttcaggttcaggttcaggttcaggttcaggttcaggttcaggttcaggttcaggttcaggttcaggttcaggttcaggttcaggttctgatgtctctaatggttctggtttggaccaatttggtcaaaccacacaatattgggcagggtcagtcactactacatcactatatcctactgaaacaaaaaattctgctaacactcccgtttcgagtaccattgaaattgttttaattccatcatcatcaccatctgcatccaataatcaaccatccatttccgttgaattcaacgcagctgtttcaaatacagcaccacaccaatatgttcttggtttaactttattattattggccctataatccaaaaagaaaaaaaaaactttcgtttgataccaaatttttcttcccattaatttcaatgaggatagtgtatattatattaattgttcttttataatatgatttattttaattagtttacttttataatttaaaatgcaaatttctgcattaatatcaataatagcttatgtgtttcataactctgttttcttgattgtcacgattgacttctgagataattatagtacaccatatacgtgcacatgagatagaggaatgtgagaatatcacaagattttagattctcataataatatttaaaatttttcgtgactttttttttacagtggaaaacgaatatctccaccattacttttaatagaatacatgttttaaattgttagttcattaattaacaaacatgacttaaattgaaaattttacaaaaatgtgttgtatacaaaaaaaatgtgagctaagaggttcgaactcttgcatccgaagatattgcgacctgaacgcaacgccttagaccactcggccaaactcacaaaactaggaatttgaagaggcttaaaaaacagagcagaatatattaatgcacgtgatctgcaatagttgataaaataattgttaattacttatgtaaatacagcagtatttgcttgatatttaatttttgcacaaataatcctttttgaagtactttaattataaaaacactcaatatgtcaagttttaataaaaaaaaaattgctaatgttaaaatagtcaaaagaatttttaaaaataaaaacactttttggaaaatcttattttttagtaaataaaagagttaagtttggctttgcttggcattgaaagatcatctagggtatgaaataaagattaaatatagttgtttaaacaatttaagattaatataaagtaaacaagataatgaaagattggttttacggatttgtagatacttacttgacaatagttatcatattttcaatggtttaattaagtagtttaactgatacagatatattgtaattattatctatactcgatatactatatgtccgatattatatgttacttcaacacattttgcaaaagaaagttaaagaagaagttagaaaaaaatatttttttaatgtcaatgaaatcagtgaacaaactgagaataattaatcattcctgtgtacaatatattacgttcctctttttatattttttgcaaaaatgatatatagctaaatcgttgagtagatataagagctacacttaatacacaagatggattctgatgatgatataccgtaagtaatgaagagaagttctttttttttggagataaatgaatatataagggatttgaatactaacatattaaaatttatttcagaatgttatcagctgcaacattagcagcattacaagaatttaagagtgaagagaaagaaaggaatgagaaatttgcaagtttatatcaaaatgcagaggaagcatttgagaaacgcagtaaattaagtattgatgattttaaggaagattggcaattatcacaattttggtatagtgatgaaactgctagtatattgcttgatgcattattagaaggtgcaactgaagatacagttatttgtattgcaagtgcaccatcagtttatgcaattattaataaacgtgatagaagtaaattaccaacaaagaaaatttatttatttgaatatgataaaagatttgaattattatcaggtgaaaaatattttggattttatgattttaatgaacctgaaaaattccgtaatgatttaattggtaaaattgatagattacttattgatccaccattccttgagagtgaatgtcaaaagaaatcatctgaaactgctaaacttttattaaaaaaaaattcatctgctagaattattacatgtacaggtgaaagaatgaaggataatgttttaaagaattatgcagaggagggtgttaaagttacagatttttatcctgaacataagaatggtcttagtaatgaatttagatgttatgcaaattttgactgtaaacaatggaaaaaaatcgattaaataggattctaactaaatatttaacagttacttgtatagaacattcaatgtaagtaagcatgtataactaaaataaactaaccaacatcaatatcaatcttaatgcaactgaactggcataaatacagctactcaactattacgtagttggtgcggaacgaagtgaaataaatttatttgcactgcatgagcttttcacgttgaaaggttttacattatttatttatctttaaaacaacttatattttaataacatttagtattacctgctaaacaactggtaatatatcatcacagataatattttatttgtcttactattttatacggatataaattttttcattttaaagaaaatagaggttgactattatattattataattacaagaaatttatcatctatttaaagatttttagaaaaaaatgcacataatatttatacgacatggtagtcgaatagataaaagtaatccaggtatatcaccttcacattcaagtatttcttttgatttagagaaaaaatctgttaaagttgatattgagaatgaacttgagctagaaagttctaattggttatcaaattttgatccaccattaaatgaaacattagcatcatatgaaatggataatgcatttatgaaaattcaaaataatatatttaatggtaggaaacataaaacttcaagaataatgattcattcatcaccttataatagatgtatacaaacaagtgaattattattagataaaatacaaaaatttaaattaaaggagaaagagaagattgatattaaattaagagttgatcaagcgttaagtgagtggttaaatgaaaattataatttaaaatatttaccaccaaatgatgatggttattcaatgataaataatgttaatgcatatttaaatcaagatataaatgattttaattgtaaaggagaatttagtagtaaaactagaagtcaattaaaagatgttaaagattttacatggtcatataatcaacttggacattgtggagaatatggtgaatcagcatcagcatttactagaagatgttttaattatttaatttatttattacaattttattatatgagacaaaattctgaagctgataaaaatatgattgttttcgttgtttcacatggtgcaattatttctacattattacaaattttattaggtagatcagttttcaatgaaattccattatgttcaccaatttattttaaacaatctgaaaagagaagatcagtttttaaattaatggattatgattttaatttaaatcaattattatcaccatcatcagatactgaattttataaaatattagatacaccaattgatttaactaaattagattcaaataatttaagaagtgaattaactattggaactagtggttatacaactataattcaaagtttaccaaggacattagaaagtcctaagaataataaaacacgtaaaagaagaaatactattaatattggagataaggaaaaggatgagaataaaggagaaggattagaatcattaaaatatactagatcatcaaaacaattatatttactgaataaagatacaagtgaagagaaagtaattgatttaaataaattacatagttattttggaagtggatcagaaagtgaagatggtgatgaagatgaagaagaatatggaggtttgaatataaatttaggtaaaaggtatagtagtggtggtactcctactaataataagaataataataagaataataaaaataaaatcacattaacagatgataaagaaaaagactattatgaggataataatgataatgataataatgataataataataataataataataatgttttagtaagtataaatgattttgatgataagggcaaaagtttaagtgaaaatgtatataagggatcaattacatcattaagttcatttaatgaagagaataagagtaaatttcaactgaatgaagagaatttttatagtaagacatcaccgattattggagatccatattcacatttctttcttaatggtgagaaagataatgatgaaatttataaggatgaatttaatatgagtgcaactactagtcaaaatggtagtataagtaatacgattgaatttaatggagattttaaaagaaataatggaggattacatatgagtgataataggaatggtaagattggtattagtatatgggatagtgaagatgaagatgaagatggagatggtgaagaaggtgatgataatgatagtattgaaagtgatgatagaaacgttttatcatttgatacaagggctaaagttgaaaagataatggataaggagaatttagagaaagaggaaggtaatggtggtagtagtggaaataattccggatccaatgtaagactgatgatacctaagttgatatcaacgcggaatatggacttacttgtaaggggtaatgacactaatagtaagagtcatgaaagtgttggaggatatggtaattcacgagagaatgaattgaatgcattaaagagattactggaggatagtaagatgatgagttcagatgatgagagtgaagacagtgaagaagatggatggtttggaggattttcctaataaaatagagcaaagtaaagcaaagcaaagcaaagtaaagtaaagtaaagcaaaatagagttcgtctatataatagaatttaaaataaaattttaattattatatagagcgcatttcatcactttttttctctttttctttttcttcttttgcttttttcttgtgttattattattattattgttattgttattattaactttattaatattaactttattattaatcaattcactaatcaatggctagcttctttaagaaaatcaatcccaaacttaatagatcagcctctaataataataatcataatcaaaatcaaaatgattcaattattgatcaggaggatcatcattcttcatcccttcaaaattcccctgctcagttaggtaataaatctccttcaatcccacctccattaattgctttaccatcacctcctataagtcaactaagagatagattatcacctaaaattaatcaaaatcaatcatcacctcaatattcttatgataataacccaactccttcaattcctttaaatcccgttataacgtcgtcagtaacgaaaataacgccaattgagaaaaacgttaaaaaatttaatgagcatcaaaataataaaccttataataatattcaaaatattcaaaatattcaaaatattaatagtatacccaattctgatagtaataatataatattaaatgatactccatttgctcaatatcaatcaactccttggaaaaaaattaaattatataactctccattcccaagatttggtcatacggtttcatcatttacttcaaattcaggtgatatttatcttatgggtggattatctggtaataatgtttatggtgatatgtggatattagaaccatcaacaaataataataatttaaataattcaaattcttatatttcttcaccaattgaaaatattcaaaaaattccttctccaagaactggtcattgttccgttttaattggtaatgcttttataatatttggtggtgatacagcaattaatgatgaaaatcaatctttagataataaattatattttttcaatataacttcacttaaatggacaattacttcatctattggaattaaaccttgtggtagatatggttcccaaatttctgtactaaattttgaaatatctccaaataattggtcaagtcaattatatcttttcggtggtcaattaaataatcaatattttaatgatttatggaaattcgatttatctaattttagagatcaaaaaaatcagtggattaaattaattccaattggtgatatacctccacctttaacaaatcattcaatgattgcttataaaaataatttatatattttcggtggtcaaaatgatttaataattaatgataaattatattgttataattcaattgaaaattcttggtcaatttgtaaattaactggtccaaatttaccacctgctttatcaaatcattcagcaactatttttggttcgttacttttcatttatggtggtaaattagcaaatgattcaaattcaaatgatttatttataatagatttatcaaattttagttgttggaaattaaaatcaaatttaccttttaatccaggtccaagatatggtcattcaattactgttgatataaataaagaaaaattattaattatgggtggtgatatttatgataatgattttaatggtgtgaatgatacttcatcaattgaaaatattgatgaatctaattttaatttactaagttctgttatttatgaatgtgatatttctaaaattgatacatttattgataaaccattaatcaaaaattcttatgcagaatcaaatttaaattcaatttttaatggtaacaatgataatttaaataataaagaaaaaataattaatgattataatgaagctagatcaagatctaatattgatttaaatgaatctacagattatgatgataaatttacatcttcaactccacttcaaatatcagatgatgaattagagattaatgattcaatacatacagagattgaagaaggaaaagatataaaacaagaaattgaagaaaatacaattaatgttaatgacaaacaacaaacaaaggatgatgaaagtttgaattctaattctgattccaattttaattccaaatctaattccaaaattgaggatatagatgacacagttaatataacaaccaacagtatcagatctaatggtttagatgataatttacatgaacaattagatagagtttcatcaagtattattaaaggtaaaaatttttctaatcttacacctaaattgattaatcaaaataaattaaatgaacatacaaataaagaaaccacacctgattcatttaaaactccaaatttaaatgaatctaatgatattaataccgaagattatctagttccatcattatcaactccattaatcaaagaaacttcaacaataccattttctccagctcttattgaaaaggataacattaaattacagaaattagttcaaatggttaatgatattaaatcagagatgaaaataagcatatcaaatgcagattcacaaattgttaaacttgaaaatgagaaaaataaattaattgaagaattaaataatgttaaattagaaaataatgaacttaaagttataaaagaagttgattatagtaaattaaatgaacctggattagcaatgaaaaatgttgaactacaaaaatttataattaatgaattatcaagtattgaatcattgaaaaatataatgaaagaacaagatgaaaagataaataattttagtttacaagaagaattaaatgataaaatatttgagttaactaatgaaaattctcaattaaagaataaaataaaattattagaaatgagttataatagtaaagaaacttccaataacaataacaatattaataaacttaataataaacttgacttattagttaataaatggaatactattggaccacaatctaacatcaataatcttgaaattgaaaaaatcaataaagaaaatgatgagatgaagaaaaatttaaaggaatatgaagtattatttgaagagattaaaacatcattagatagatcacataaagctttattattatcacaaactgagaataataaattaaagaatcaaattaaagtaactaatgaacaatttgatgaatttagaatgaagaaaagaatttattcatcatcaagttcaagaattccatcaattagtaaagaattcaaagaaaatgaaccaattgatgataataaagatggtaataataagaatgatgttttaaacaatgagaatgatgatgatttaattgttgataatagtctaattgatgatagatatgagattaaaattaaagatttagaagctaatttatttattgtatcacaggaaagggatcaaataaaggaagaattggttagtttaaagaaacaaatgtactataattccaaagtagaatagaatataatataatagaatagaatagaatttacagtataacactcttttaagtatgcataaaacatttagaaaataattaatttatttatttatgaaccccaattaagatgacaatttattacagatctaattgttcatcatcatcattatcccataattcatcatcatttataaaatcatttaaatttttaccattattatcagtaagtggtttatcatcatcattatgattatcattgattgataattcctgtacaaaatttgatatattttcagtagttaattcatcaactattgaactattattattactattattattattattactatgattatccagacttttccttttatgttgtgaataagatttacgatttgatattaaagcagtatcacttgtatttgcctttttattttctattttttcatcatcatcaattaataaatttgctttaaaatctgcaacgaatgaccaaagattttgttgaattgaatgcataacatcatttgaagtatctgatgctaatgatttaattggttcattaattatattattatcatcatcatcattatcatcaatagtataatcttgatcatcattttgctgattttgatcatcatcatcatttgtaaattctctataaactaaattatctaattgttgaaataaatttattggtttattaaaccaagaatttctattttgattataattattattaatattatttcgactattatttcgttttggtgatgaagttggtatataattatcaacagttaatggatcaattgttgttgaattaatattttttgatttatttatatttatatttgaattattaatattactctcctttggtaaattattttcaatatttaatttaaattgttgtaattctaataatttaatccttttcaatgaatttaatttctttaatttattattaatttctaaaatttccatttctttcattgcaagtaatcttaaattttcactatttttatcattttcaaaattaatttcatttaatttagtatttggtagggaattcccacgattacgatttggtttattattcgtgtctgtattcgtgtttgtgttggtatttgaatttgaatttttaattggggatgttgttgatggtattagggaaatacctaaattaattcctcttcttggatgtgaaggacttgtaccactagttgttcgtttgtgtcgttgttcattcattgatttgattatgaattgatataagataagaaatgtgttgttgtgatgtatagaattaaggactgtgaggtgtgagatcgatggcatgaaaatttcaatattattatttactatttaacaattttgaaacatcactggttttttttaatctttttcattttacaaatgtttttacgtgaatcaaagaatgttaaaatagagaagataataccaatccctaaatttgttattaaatgtaaattattttcaccatttgggaaatatttaatgaatactaaaattttcattaatgtttgtgaaaataaacgtataccattaaataataatgatttaattaatgaaaatgaaactggaaatgaaaaatttaataaatttaaaatttttgaattaatttctaaaggtcaatgggagataccaattttaacatcaccaaatttacgtgaaattaatgataaaaatggtaatttatcaattttaattgattgtgtaattaatgaaaaatatatgaattggtgtttaattaataatgaaatgaaagaaattttaattcaatggtgttttgatgcaattgaattttattttaatggtataataattaatagagattcaatgaaattacctaaaagagaaaaaatgggtgatgttgaggaaattgaattagatgttgaacatttaaaagaaattggtaaagaattagaggaattaaataaggatatatttattgaagataataagaaaattgaaagttattgaacgaaaagaagggtaaggtagaggaagtaaggaaagagaaagttaaggagaaaataacgataaaggatacgataagtgttataatggaaagggttaagagacaaacagttatgggacatgaatttgagataattgttaaatgtaataaaaatgatgaatatgtagttaatgtaattaatgatgaattaattattcaaaatggagaaataggagaagaaaataccattaccatttgttaatattgaaaagattaaatgttttaaaattaatgatggtagtaatgaattacatatttttatatagttatattaaattgtttaaattctgatgtaattaaagtaaatgaagtattttttttaaaactttgattatttaaatcaaaattaaaatcagataatccaataattgaatgaattccattattaattggtattttacaaattttttcaattttccaattatctttaattaaaataatttcatccacttgtaaataataaaatatttttatcaatttccataatataatggaaacttcattaatttatttaattttgaaagttcattaattattggttcataactatcgaaaataattaactttatttgattcattaatgaaaattgtaaattttttcatataattgaaaactatatttgaccattttaatggacgatcaattaattcaacacctaaatcctaaactaataaatttagataatttataagataacataataggagttttaaaagggaaacaaaattttcttgatttattaaatctaatagttgtagttttcatcaaatcgattttatcaagtaatttaaattgaaatgatttgattctgattctaattctaattctaattcatatttaaataaataagcagtgaaaatagttgttggagttaaattttcagttgatttagtggataataatataatatctaattcatcatcataatcaattgaatctattaaacctggtgataatgatgaaattattttaccttgggttatatcaattatatataaggtatcagatgtatagtataaatataatgtatttgataatttaaaattatttataataataccattaattggaattgatttaatattaatagttttaattaatttattattttttattttattattatcctttgaatgattaattaggtaaataccatttgatgtagttattgagaatatagatttatgccattgttgaataattggggatgttccattaagtgaaaggaatggtaaatgtagtaagtttaaattagaatcatatgataatttagataaatgtgaggtattatcatcgttatcagattcaattgttaaaagacaatttttatcaaatgggattaatttattaataatttttgaatttattgatgttgatagagttttaccattttcataatcataaatgaataaattattttctgataatatagtaatttttgttttaaaaattgagatatctttaattggataaattgatgaccaatttgatgaatgaaggagtgaaattgaatttgaagttaaattaaatttataaattgaaaaatggatattattataaataacaaatctaattgattttgaagataaattagtaattttaattgaaattggttggaaatgaagttgtaaatttttttcaattataatattatttaaattgaagtatgtaaagattattattagtataagcaattgaaatatattttgtagttgaatggataattgatgatgatgatgatgatgatgatgatgatgatgatgaagatgaagatactattggatcaaaaatatcataaattgaattaaatttaaaaattttattaattgaaattgcaaaattttgacaaattgaaataattgaaggtggtaaaatgatttcttcaataccatttaaatagtaattgttgttagaaaatatgataaaatcatttttattaatgaatcctaaaagggtaatattttgatgattaattgggataaatttagtgtcgtatgagtttttagtatgaaattctaataaggaattgtaggaatcagtatatgaagtaattgatagggttggagttggattattgatgtttgtaaataccgttaaatagatggtagttcgatagtagatgatgattctgattgatgatgatgataatgaaggtgaagtgtttatataggtaaatttcatgagattgtttatcaattaataggaaacctgagaattcatttaaaattatataatgaagatcagttgaatgtaaaatagttggtataaatgaaatatttaatggtaaagttgtattttcatcaatatgtaagttaaaatcatctaaataagggtaggataaagaatttttcaatgatttaaagttattttctaatgataattaggttaaagttgaaggtattagacctaatttgaaggtggtaagtgataataaatgaggtagagtataagggggtgatgataataataatgattgatatttaaatttaatgtagttatccttgatattaggatttgaagattggaaataaattgttaaagtgttattaggttccaagaattcaattttaacgatattataaccaggtggaggataagaggtaattaattgaggatattgaacaataattgatgaattgtataatagtgtagtgttatgatagtttaatagtggcattgtcaatataggaagagaatgtagcgattaaatggttaaatttgttatactgtactatactactttatataagagaagataaataattatatggataagttaataaattttgtaatttattagttggatgagtagttgatgaattagatgtagtataaggtaaagaatgttcatttgaagatacaagtatgaaaattgagaaaggaattaaccaaatttgtaatgcaaagaaagcagaaatttcatagaatgaagggtaatatggaggtataaaattatcagataatctttcagttatagttggaatatagggattagagaatgaatgaaaccaagaataatgagaaataagtgcaagaattgcattagtgataataattggagatgaaagtgataaatttggtaaaattgaaggattaagtgaatgaatgtatgaaatatttgcaattgaagatattaatacaggtaaataaggtaaattatcagttaatggtagaataattgtaataattgaaatggatatagcaatttttttaataaatttagcagtataaagtaaattctcttctaccaattcagacaaataatagagagcagcagctagagccagagtgattgatacaatacccagtagagcagcacatacagtaataaacaccaatagcataccaaaagaagagaagagtatactaataaagacatataagaaaccctcagtaaatgtgaaaaaaagacaatttactatataaagagaaggtatttcccactgtgtgttattctcttatactctcttcatttagtcatgttaatggactacattgatctgtgatgattgttattttattacactgatacacaccaaggctcacccgcctgggttcttccgtttagtagagtctgttctactactcattgggaggtatgatgtgtctgtttagtcagtattaaactactgagatcagtaatagtctttatactttaatatactgttgtgaaaatttttattttatttgaaaattttattttatttaatcttatcttatcttatcttgtagtgtttcttttattttattttattttattatcttcttctttctttctttcctttaccaacaatgtcctctccaacttcttctaatagaagttctcttattgatcctttggatgatttagatttagatttcaaatctttatctgttacatctctaaattcactaaattctatcaacacttcgccacttttaaataataatatcgatataaatatatctttatggaataataatattaataactctttcaataactcattcaactctataattaataggaaacaacctttaaatcattcaaatgatcatttcttatcctcattcttaaaattatctgatgatgattatattattaataataatagttctatcaataatactacagaattaaataaaactatttcaaatgattcattacaaagatcttattcaaatcaattattaaataataattcaattattaataatcaattcttaaataagtccaatacccataatcattctaatatcaatactccaattaatcaaaattacctttcctctattaaatcttcaaatactgataaatctctctacaagacagaactttgtaattctttcattacacttggttattgtccctataatgaaaaatgtcaatttgctcatggtttaaatgatttaaaatctcttaatagagatccaaaatggaaaactaaattgtgtaaaaattggttaaattcaggttattgtagatatggtaaaagatgttgttataaacatggtgaaaatgatcaaggttaaagtctatcatatactacattacattacttctttactactattattattattcatttgggtgtctctcggtctttttttctttatctctgttttaattatctaatctatcttatttatcataccatattatattatttcctatatattatcttatttcctatatatcttatttatcttatttatttcttagtcatactataccttaatcatgtcagatgatacaacaatgtcaatctatacaaactctaataattataaatttcaaacttttttcaaaaatccttcatttgattcatctcctatcatatttgttgctcatcatggtgctggttcaactcatgcaacttttgataatttatcattaaaattatcacataatgcacaatcattaaattattcatcaacccctggattcttctcctttgatatacgtggtcatggtatgactaatttacttaatgataataataataaatcaaattatacactttcaattgatcaattaattgaagattttaaatttattttatcacatttcctaaaatctttaccttataatccaattataatcctattaggtcattcattaggtggttcagttttaactaaatttctttataataatcaatcattaaataatattcacggtctaatcataattgatacagttgaagaaattgcaattaattcacttaatttaatgaataattatatattaaaattaccaaaatcttttaattctaaaattgatgcaattaattattttacttcatcaaatttaattaataataaatcaagtgctttattatcaattccttcattattgaaaaaagattccattatcaaataattataaatttattacagatttatcacttacaaaacctttttggtttaattggtttattaattcaagtgaatttttcattaaaatttcaaataaattcccaaaattattaattttagcaaataatgataattatttagataaatttttaataattggtcaaatgaatggttcttatcaattaaaaatttttaataatttaattgaatcttctaaaattggtcatttcattcatgaagatataccaaataatttatcaattactctactagattttattgaaagaaataattataaaaatttccataaattaaataaaaataatgaaattgaaaataatgaaaatgatttaattctaaaattaaataaaaaatggaatgttcaacaatagtccttctatttattcttataatcaattaaaaatttattaattttacccctaccaactgggaacattggattaattaaaaatggtcttaaatcaaatctattatcatcaggtgaatattgttctgcatgatatgatggtgtactaacagtttgtttatgtctattaatactataataataaaaaaatgaattaactttatctgcaatttcttcaacacttttataatctttccaaatatgtgttaatttaataaacattgaatatggtccacatttatcaattttacgtaatttacccataatacttaattcattatatgtaaatcccatatcaatttcatctgattgtaaataattttcagtaattggttctaattcagctgttggtgttgcattaataaattcatctaaaattgaaaaattatattcttcccttgaccatttaataaatttaattaaatcatttttagaaatccctccaattggattaatatcagcacttgaacaatcatattttgttaaataacctcttaattgttcatcaacatttgcactacctaaaactaataaaccacctaaattttgtttatttctacaccatggtaataattgtgcaaataaatatgataaaaccattcttaatcttgcttgaatattttgtaatgctaaattttcaatttgacatccaccgaaaattttataaattggtctcttacctgtggtaatttcaaataatttaataattgattcaacaacaatatccatatttaaattaatatgatatgatccaattttttcacttaatcttaaacttctatcccttgtttcctttgatgaattaactgtacccatataacatgtatggaaaattaaattagcaaattcttcactattttttggtatttcatcatctttttcaatttttaaaacttgtttaatatctttaataacttgtaaattaccattttgaacttctttaataactaatttacacattgtatgaattatcattgcagttgcacaactatcaatacctccacttaatggtaaaaaaaatccattacctttacaacgacgtaaataatcccataaccaacaagctggaccaagggcaatttcctcctctggtaaatgatatttaacttctttaattgatgttggaactaatgataaatcaaatttattaccctctggtgaaatttcaatatttaaaaattctctttcataaattggtgaaaatttactttgtaaaccatgtgaaattaatgatttatatgatctaacatcatctaaatcaattgttgcagttaaaacttcaatatcattaagtgaaaattgtgatgattgagctaatatttgtccattaacaattatcattgaactaccatcataatataatctatcaccatcacatcctctttgatttgaataaagataaattccaccacatttacgtgttgcttcaacaattaatgaaattcttgtatttaattttcttaattcatgatgtgaacctgatgaatttgttataatttcaattccatctaatgataatgatatatgcggtgattgtggagtaaacatttcttcacatgtttcaaatccaattactgtatctaatgtttcaattactccatcaccaaatttaacaaattcttgtccatttaatttataaattaaatttggtaatttaaattgttcaatatattgagttttcaaccatggtgtaaaatatctcatttctctataattaccatcatttgcaaggaaaattttaggtctaattaataaaattgttccattatatgataaaattctacaattatatcttctatttttatgtataattggcataccaatatcaagtataatatcatatgttctctcatctttaagaattgtttcatacatctcccatgattgtaaataaatatcattttcaagaaaatgatctaaacatccatatcctgtaatctctaattctggtccaactcttaattttgcacctttttccttagcaattaaaattgattctaaaattctatctctattaccttcaaaatctaatgcccattgattcaatgagcatgtagccagtgtaacatattgtggcatagtctgtccaaaaagaacgaacatcttgttatcattaattaattaatttagtcatataatagtacaaaaatttatttaatttaatttaatttaatatattacataatcacttagttcctcaatccttatccttacttacccttcttaatgacttaaaccttctagagaatgaattggatgattgcaatgcacttggaggtacttcaaatgtatccagtgcacctccatcttcatcatttccatctagtttagtaactattggcggtatatgttgaggattccttattgatgacattcctagttggtgtcgttacattattgctattattattaccaccaccactactattatcttctgatatagtttgatgatgataatcctgctgttaatatatatggcattgacattccattatgttgtgatgatgtattaattgataatcgattcttattaaaattagaattagtactcgatggtgtattattatcatttattcttgaagtttgtaaaaattcatcatcaattgatgaatcaatattatcattaattaattcaattggatcatcatcaccaatattattattacccattgctctacttttctgtaaattatcaaaattctcacgtgcattctcacgtgcaactgccaataattcttgtgctttctgtaatggaattgttggtgttgaacatgatgaaattgcaggtatactagtcatctaattcaattgttgccttcattaatgctgacatccaatttctcatctcttctcttgtttcaactgcaaaataatgaactttttgttgtgtaaatgttaaacctttacgtgatccaggtgcaggtggtattaatttaaaacaaaatctaccatatcctgcacttgcagcataaactgcacttaatttatcttctgcctcagttgcaggtaaaactctatgtgatgttatatcaattaatcctttctcctttgtatcctttgttgtaacataatatgataatctagttttatgtaatgtgaaaaatctttgtttccatgaaccaattgataaattacccctcttaaacatccaacctgaaatttctgcatctttaattgcttcatcaggtgtaattgatctaataccttcttgaaatgctgatgtttgtgatttaccatttctattacctgttaccattgatttaaatgttgattgttttgattgtaatggaggtggtgttattaatgattcttgattcattgtatttacttgtggttgaattggtgttttagatgatgtaattccagttatatcacttgttaatcttttagttacatctttttgtttcatcatttgtgtataatctttagctgataatgatcttctctgtactgatgaatttgatgaattattattatgatttagttcaggtaattttgttataacatctctctccggtgatggagtatttgttccaaatggtttattaataataattgatgaatatctacgatgtgatttaccgttattactattgttattataatcatcatttatatcataattattattgaaaatttcaagatttgaattgtcagaaataatacttgaatgtcgacgtgaataacttggactcattgtatcaacataaattgatgatgtattacccattgaagaatttctactatgactttgaatattacttaatcttggaattgaattagttaatttagttggagatctaataccaaatttttgtggattatttgcaactggtgatggataacttggaggttgaggtgctcttcttggtgaaacaaactgttcagaatcattatttggtaaatctaatgtatttttagattttctacgtggagttgaatttggttcatcatttgaaactttatcaattgaataatcattaggtatattaatatgagaatctgttgaactattaaattgcagtggagatggagtatttttcaaaattttagaatgatcaataataactgactgaggtctttgattatttgagttattaaatctattatttattttattactaaaagtattatttcttgataaattacttgatgagcttggtgaatcaattgttgaataaattcccgattgattattattattgtaagtattgagattttattattagtattattattattttcaatagttgatctcaattcttcaatttttttataaatttcaaatcttgtaccaaatgaagttatatctaattcctttaaataagctaattctaattctaataaaattgaacctgaaattttatgagttttgaaattttctgcaatatcatcatcaacgaattgtttaaaatattgtgcaacttgatcaggtgtccaatttggtgcattaattggatttaatggattgttattagtattttcatttttattattattattattatcaatatttaattcctctaaagctttatcaatatcattaacatatctattaacagttgaagtattattagtatcattacttgaataacttatatcattaaaataagatgaaggagcagcagttggagttattggactattttgatttgttgtacgtctagatcttgaacgtaataatgaaggttttgaaattaattcattatcatttttataaatttgggtgaaaacttttggataaagaccaattttatttgttgttaagtttttacccatataccaaccatcatcaaattcactatcatcactaattaaatcaattaaatcaccttcattaattgttaattcatcaggtaatcttgaatcaaatgatttaataactatataaagttgagtatgcgagcctattgaaacttgacgattgttactcattgttaatagtttgtagttatctatttactcaatgttttgatatataacaacagttaattagctaaaaagggtggcactcagtcagtttataaaaagtaaaattattaggcggatttttcacatagtgagaattttcactatttgttacgtaatacaatgtcttgtaacttataagtgtaaagaggttaacgagagaaagagtagatatagaaagatatagaaagagtagataaagaagtaaagatgtagagaagtaaattattcttcatcttctctaacagtattagtgattgaattcaattcctttgaataatttataattggttttgaatacattatatggttataatcaacaggtgtcctactaatacgtggagatggtgtaaaattaatataatcactcatactaaaacctggagttctattattaaattcttattgttattgttattcattgatttgttattaattccaatcggtgtacctaataatggttgcataaatgaattaatattattgttattattattattattattattaggacttaagaaaaattgtgatggtaattggtttcttaatggagttgattcaatatttaaattaattgtattattagaagatatatgttttggtgttgttggtatattaataattttttccttattattcttaattttattagatgatgttccattggttgatttatcattatcattatcattatcatgttcaatttcatgttcacttctcatgttcaatattttctatgttttgtttatttaatgcactattagtatgataatttcttgcaggtgaatttgataaatataataataaatctgcacccatatcatcagaattattaccatttttattaggtgttgaaaaatctcttgttttaattgttgaagattttggtgttgataataattgtgattgtaatggcgcattattggaatatgtagtatgattatttatatttataatattgatttcttgctttgatttattattagttaaattagtattttctcggaaaatatcaatagtttcagttggtggagttttaggattattagaacgttgattaattttctttgatcttaaatgtgtattatgttgatgatgatgttgatgtgattgattattaattgattgagaagttggagttggaattgaaaaacctctattaagttgaaaaggacttgttgaattaccattactataaggagaaatattattattattattattattaatattattattcaattggaaattacttgtattaattctcttaacaggagaagctaattcatcatcataattattatcatataataaatttcttgaagaagttgttgatctataaattgaagagtttttccttttcagtggagaaattaaaggagttatagcagtaaatgatagatttgaattttcaaaagataatctattatttctagttggagttaataattttgaattttgaatatttgaaattgcagttgcagttatattattagtaacatcctcacttaaacttttagatggggaacttaaaggtgaagaattatttgaataatataaaaaatttgattgttcattatttatagtggttatgttagagttaaaattagaattagaattagaattagaatttgtattattaatggtattattagtattattatctgaatcattatcattattattattattattaccattttggtcacgtacttttaaaccagctttaaataatttatcctttaattgtctagtcattttagcaatttcaacccttttcaaaattttttgagcaattatatcttcatttgacattggagaagtttcagttgaagttgaagaataataaatattattatcaatgaaatgattatcagattctgacattgtagttttataggggaagggggtggtaattttttgttacgatttaattgatatactatattaatgtgaaaattgttggaacttcaataaagggatgaatgattgatggatgattgtaaaactaagcaaagcaatgatatatagtttaagagaaatgaatacgttaataataataactttaataataatactaaatactaaatactaaataataaagataaagataaagataaagatataaagataaagcaatccaataagtagaaaccaatcttttccagtagtaaagacacgttaagaatcgattcattaatttgaaattgaaattgatttcagatggccgattgaaaaaaattgaaattattcccaaaagggaaggtgtcccaaaagggtaatagagaaggactatcgactcttttaatttttatcaccgatatcttccttttttgtcggcgttaagagcgtgtcacgtgcttttcttaattcctcggaggagagacaaccttattagtaataagatacctatttaggaattattattaattatacaatcaacagtttctaagtgtttctacttgtttcttttaaagttacatttctattttgatttctatttaaagtgatacaactttctaccttttttgaaaaaattcaatggcttctgttatttattcttgtatttattatatcaccaaagaattaaaggataaaaaaaaagaaaagaaattatcaaattctaattcaaattcaaattctaaatcaaaagacaaatcaaaagacaaattaaaagacaaattaaaagacaaatcaaaaaaataaataatatacaatggcttccgttcctcctactgaattagcaacttcaaatttatttaaaccaattaaacttggtaatgttgaattaaagaatcgtttagtttatgctccaactacaagatttagaaatacaactgattttgttgcaactgattcaatgttacaatattatactgcacgtgctgaaaataatggtggtttattaattgttgaagcaactttcccagctcctgaatttggtttatatgaaagagctccaatgattaaaactgatcaacaagttaaagcttttaaaaaaattgttgattcagttcatgaaaaaggttctaaaattgctgttcaattatggaatttaggtagaactgctgatccaaaatgtttaaaaaaacataatttaccatttgttgcaccatctgcaatttattttgatgaagattctaaaaaagctgcaattgaagctgaaaatgaattaagagaattaacaattgaagaaattcaatcaatgattaaagaatatgttgcttgtgcaaagagatgtattaatgaagcaggttttgatttaattgaaattcatggtgctcatatgtatttattagatcaatttttacaagcttcatcaaataagagaactgataaatatggtggttcaattgaaaatagagctagatttatgttagaagttgttgatgcagttattgaagctgttggtgctgataaagttgcaattagattatctccttatgcagaatttcaaggtgctttaggtattaaatctgaaattaatccaattgttacttggggttacgttttaagtgaattagaaaatagagctaaaaagggtaatagattagcttatatttcaattgttgaaccaagagtttcaggtattttagataattttgataatgcagcagttgatttttcatggcctgcattaatttggaaaggtaatttaattagagctggtggttatttagatgctgcaaatattagtaaattacctgcaattattaataaaactgataatacattaattgctgttggtcgttattttacttccaatcctgatttagctaatagattaaagaatggtttagaattaactccttatgatagaacaactttctataacattggttcaaatattggttatttagattatcaaacttatggtaaagaaaaggaccactcaaaggatgatgttgaattaaaaccattagcatagatttatacattatataaattatcaatttataaaaatttcattaactaactaattatacctaattatactaagaaaaaccctctcataataatacgcactgacattttttaaatttatttactctcgtataaaagaaactgagttcgctgttttttcatgtagccacctcttctatgacttttcttccttttggcaatcaaaaaggagacacattaaaggaggtatttgccacgatgaattaacgagcttttccatgtttcttcattgccatttactaaaaaagtaataatttttccctccaatattattgtactagtgtctggttttccccataggaagtttattgaatgtgattaagatattcagtaaatgtcgaaaaggggacacatttttcttttcttttttaattgattttatctataactgtgatttaacgtaattccaaccttgtaaaaaatctttaaattgatctaatgttataggtttaccactaaaccttaaatcttcatataatttaagaaaattatttatcttttcatcattattactataattttccaataattcacttaatgaataatgattatcaagttttaaatatttaccattttcattaattgttaatgtaccattatattttatctcttgaccaataatccttacaacattttcataaattaaattatctggtaattcattattatcattatcattatcattaccactttgatgaaataaacctggatgatttatattacctattggttttgccattttcttaattttttgacatctaatcattgattgttcaattttactactaaatgatgatccaatatctctttcactaattggtacataatttttaggtatttcttctaaaataattctattataaattaatctaaacatatcaattgttgcatatgaaattacgaaaagtgcaatgaaaaccattataataacagtatttgttgctaaatgtgaattataagttctactttgaattataatatcaattattaaaactgttgaaaatgttaaaattaatccaataagtattataaatgatgtagtataagcccaatgaaaactcgcatctttaggtccagttgaattaactaaccttcctattaacattttagccttgcttaatgaaagaacgatagggtatattctacttagcaaagatttattaagattttttatttagcgattttatttaattttttatcaactggtttgttccatccatggatcgattctttggaatttaccaatcaactatttatttcgatatcatcgtcagaatatattgattttgaatgcctaatctctctgtcctcatcagaagtgttttctgtgtctgatgaaaaaacatcatcatcagaagataaagttttatctttatccaaatgttcattgaataaaggctgataaatttcatgaaattgactatcaatcaatctcattcataaaaccaatcattatatgtaaagaattccacaactatatcattaagttctttccataattgaaaaaaacttgtttattgaagactttgctttgctaaaagtaccaggaccaactcttttcaaatcttcaaacttaaatgctttcctttctctatcatccatcctaagctgactcaccaatatatgataaccatctactgaaacataccataatagatgtttgtatgtaggaatatgatttttcattttttcaaagattctttttgcagctttcctatcaaaactgccagaaccgaatcttctattagctgctctataagtaagattgttctttttcttctctaatattttattccctttatcaattattttgtcaatttcttgataatccataatatgataattatgcttatccgtttcagtaaaatgatcaaaagtcttttctagagatgtagccttttcacgaatttgtttgaacgttatcttaatttcattatctacagaaacaacattgtaacaagctttaaaaatgattacaagatttttaaaagtaaaatcagtattagttttaataatatcatttaatgaagttttaaacttattacaaaactcctcaattattttatcatccatattttagcttgttatcactgatatattgagaataaagggtatataaagaaggaaaaatagatcaaaagtatgaaaagtaatgagccttcaaattcttaccttttccatttactgtgccgctacctttggtgtttactgcaccgcatatttaatttactattaatctgatactgcgaaagtggttagttgcaatgtggatatgaaactgaaacgattttaccactgataactttgataaagataccataacaaaatcggtaagatatactctatttattgaactgatatagtaaactttgaaaaaacatttacgtcattaattatgatcgttccttttactgctgtttaaagtaaaaattaaaactcagttcatcttatcagttaacagtaccttgatatcaataggggaaagacataataagaaatgaaaagcaaaacacatcgcttagtataaccacaatatcaaatatacacccccaagtcttcatataaaccctgcaactacaagcgatataatgtcttagctataacacaataacaacagaagccgtctctctcggtaagaaatgccatataataattaggatttgtaatgcccttcacttcaccgacagcgggcattcccgttaatctttactgcgcctggaacggcagtaagaagacactccctctaaggtattacctctgaagtcattacattatcttaagcctggtcatgcttcggagttgcggggaacttgatacacactcttctctgatcacagtattactatttactatgtataatgtagtcactttagtatagaagagcagaacataaaataaaaagagacatcaataatttgacgtatttttctgtcatcggagaaaaagggaagtgaaaaatttttcttctttctttgaggtatattttagttaattgatagagagatagatagcagatcatctcatgttattggttgatgagtaattcaagggtttttttatttacaattatttcccagcgtaaattcctactttagtaattactacattagtcaactctaaccgccctatagtgtatatgactttacctttttaccacatcacgtatctatagcaaagataagagaaaaaatatttcttttttcaaattatcaggaaaacagcatttttttatctttgattcatacttttcagtcatggatctcttcttgttgtttaattattatctttatctccccgcattatctttagtttattatgttctgtatctctttatttttttgttgaattcttagtatttatctaaacctttattcccacttttttttctcttttgaagtaatgtcatcttcctttctaattttaactctatctcatttaacaaaaaattaaatcatgattaattattttaaaagtgaaaaaggtaaacagacaagtcaggttcatattgaaacttatcctgacgattcaataaatgatatttcagaaacttataaatcaagttctccaacaccttctcatccttatgatataacatctcatgcagatgttgaaaaaattggttatgaccctgaagataatggtcttggtgaattaaaacgtggtttaaattcaagacatgttcaatttatttctttagctggtgcaatcggtaccggtttatttgttggttcaggtgcagctctttcaatcgcaggtcctgctggtttattagttggttatctagttttatgtttctttgtttggtcaattatgaatcaattagctgaaatggttacttatttaccaatacctggtaaatcaactccttatgctttatgtgaacgttatactggtaataaatctttagcttttgctgctggtttaaatcttttctacgctcaagctttattaactcctgctgaaatttcagctgccgcttttgttattgaatattggactgatttaaatgtcgcaatttggatttcaatcttttgggttacaattgttgcattgaatttttgtgctgttaaagttttcggtgaaattgaattttggattgcttcaattaaaattttaactttgacaggtttaattattgttggtattgttatcttttttggtggtgcaccagattctcatggtgttttaggtttccattattggaaacatccaggtgcatttgttgaacatttaaccggtggtaatacaggtaaatttttagcttgttggagttcaattattaaatctgcttttgcatttattttatcacctgaattaattacaatttgtgcagctgaagctgaagctccaagaattaatttaccaaaagctgctgatagatttatttaccgtttattctttttctatatatgtggtgttttagttattggttgtattgttggttcaaatgatccacgtttaatgagtgctatctctgatggtgctgaaggtgcagctgcatctccttttgttattggtattcaaattgcaggtatcccagttttaaatcatattgttaatgcagcaattttaacttctgcttattctgctggtaactctttcttatatgcatcttcaagaactttatattcaatggcagttagaggtgatataccaaaagttttcggtagagttaataaatttggtgttccatactgtttgtgttgcttgttcatctgcaattagtttacttgcatatcttaatgtatcagattcttcatcagttgcatttgcttggttttcaaatatttcaacagtttcaggttttattgattggatatttgtttcaattacttatttgagatatagaaaagcattagattatcataatatgaatgatagagttacttatagaccaccaattcaaatatttggctcttatgcatgtattttctttttctcacttgttgctataacaaatggttatgcagtcttctttgatttcaatggtagtgatttcgttgctgcttatattacaataccaatcattgttggtgtttatcttgcacatgcaatatggactaaaaattggatgatttttgctaaacctgaagatattgatgtcgttacaggtcttgaagaaattgaagaagaaactagaaattatgttaaacctgttccaaagaatttcttacaaagaatttggttttggattgcataattttaactctaattccaatcacgacttcatttattaatacctaccctattgacaaatactctttatataaactcatgtataatataatataatattatttaatcattaacaactttaatgaagacaccatgttaatacttacgtaattcattaataaaattcactgaaaaaaaatttcaaattttttcctcactcaagagcttttgaattgttcagtaaccactctttgtcgagtttagcaaatcgtgaatcatcgtttttatttaaaatttccttcatttaagatattaacgcttgcctatttgaacagtagacaatgtcggatggttctgctattgaaacgaagtgggccgatgaaatcatccccttgttaaaccaattaaaatcatcatctgttaatattttagatgtcacactatttaaaattaattcagtattacaggatgaatctgaaaaattagaaaattcacaaaaagatttaatattattttcaattttatcaacttttacaagatatccatttgatacaaaatttaataaattaattttacaatcttttaatcattttattaatattgatgctgaaaaatattcaaaaaatattcttgcatttattgctaaaaattcagcacaaccaattgcaactagagatttacttattttgattaattggaattggtatattataactttagttgctgacaaagaatactttaattcattattaaaagttgcaattaatacttcaattagtttaattgcttcaattactgaatatagttcaattgaaaatttgaaatttcatcatattaaagcaattaaagcttttaaaagatcaactattaataaattaacacaattaattaaaaaagatgcacatattattaactcaattgttgaatttgtttgtaatgaaaaagctcatgtctcaggtattatctccctattaggcctattatcaatatctgttaatcaaattaccgataagactgcaaaatcattaatggaaaataaggaaagtgaaattgttaactttattgttaaaattgtttttgcaaccaaaactgttccaaataaggttgctttagaattatttggaaattatgtatcaaatttcatttcagaggaatctttgaagacaattttgttaccaggtttagaaaaagcagctttaagaaattctgaattaactttttctattttagctccactatttgcacgttcattaaattataaaaatattaatgttttagaaatcttttcaaaggctaaatttttctcccaattattctcttcattaaaagcaactaaagaatccgttaaaattggtgccagtaatgttttatcagttattctgcaaaataatcaatctgagaattcaagtgatgttttatcctcatatgttgatgaaattttcaaagttcttaaaagtttatcagctacagctgttgagcaaaaaagtttggtattgaaagttttacaagctgtatccattaatgatgtacctgcaagtaataaaattatcgattcattgattccatatatcgcaaaggaaaataacgaacaaattttatcaactgaatgttcaatcttattaaatagatttgtttacttattattggaatctgatattgttgagtcaaaggaaaaaatattcactttaataaataatggtattaacgataaaaaaatacctgttaaaatttcatggtgtacctcattagcaaattctattacatccgttgatcttgaaaataatacatcatcagaaactaagatacttgaattattaaattcaggagtttcaaaatcattattacaaacatttgatgattgtgttaatgcgccattaccatgtattaacaataaatcaatttcagcaggttatgcatctcttgctattcttttatatattgatgaaatttattcaaatactgaattaaaacaaaaattacaagagtttaatgttattgaaaaagctttaaatgataccgaaactaaaatgtcatgttttgttaatccaaaaataatttctaaattaacatctgaattcgcacaagaatggtatatacgttcattattctatatttcacgacatttaactgaatcttcaccatttttaggttttgctattttatattcaacaatttcaagaaatgttacaccatcatcaagattattagctaaaaagttacttaaatccgcttatgaaactaatcaaaatgttatcggtttttcattaactaattcattatataatttaattgaagattcatcaattaattctgaatttaatttagattatcaatatttattgccaacaatttctactactttccatacttttgataccattgatcaatcaattttagaatctcaattagttgatttattatttatttttgaacataacttactttcaaatatttctaatggttgggttagcttatgtcaaaaatgttttgctgatccaggtaaaattgtttctaaaaattctaccagcattattgaaaagatctctaaaattcttgttgatccatcagaaaaagttctaaataatggtatttttgatgctgcttgtaaaacagtttcaattatttccttcttctcaccagctgttattgttccaaaattatctcaattaattgaagaagatttgtcaattgtttcgaaattagatattgataattctaaacttgatatttggaaaggtactgatgatgttcttgttgttgatgttttacaatccaaatctagtgttaatattgctaaatctaaagatgccgaaactttgaaatgggaaagagaagttcgtaaagaattagatgctaagaaaaaagtcgccaaaaaattaactaaggaagaacaactcaaagttaatgaacaattaaaattagaaaaagaaattagaaattcaattaataatgattacttaaaacttcgtcgtggtttagaaatcattatttcactttcaaaacaagctaaatttgttgataatggtactgaattatggtttcctgttgctatttcaaatattttacatttattaaattcatcatctgctgttaaacttactggtgctttatcatctgaatgtttcttatctctatctgatgttgttgcaactgattctttatcaggtacttccgatatgaaattcattggttcatctactttaagattatttaatgttagtcatgttcctgctaaatattctggtatcgatcttaacgaattattagcatctcaactattcagtttgaaattatgttctgataaatcattatttactaatttgatgttaatgtacgttttaccattattaaccagagtcattgaaattggtaaaaattacattttgaagaccggtaagaaaacggttaaagttaacactgaattctcagaagattcaccagaagaagaacaattaattttagctttagaaattatttcatccaattcagatttatttgaaaacgaatccattccaagaacctcaatcattgaacatttaatagaattattagcattaccatctaaatccaaaaatgcaaaagagtgttttgtttcattatgtcaaaatatttcagtcaatatttccgattctgatttatcaattattctaaaatcattaattacaccaactgtttttgttagaactgcattacttgaagttttagatcaagaaattgatttatctgaaaaatcattcaatgaagaagtttggatttcatgttttgacaatgtcactatcaataaagatattgccgaaactatttggaatgaagctggttttaaattagatgaaactgttcctttcaaattaatcaaatacttaggtaataaggataatggtattagattatcaattgctagatcattagctgcatctgttattcaacttgaatccaatgatttattctgttcaactttatcagatttattaaacttatacaatgaaatgtgcaaacctcctactcctgaagttgatgcttacggtttagttattcataatgttgataccatgaaagatagatgggaacaacgtagtggtgttgcccttactattgcacatttagctccgatgttttcaatttcttcagaagtttcaaatttcttcagatttttaattaaagatagagctcttggtgataaggaattattagtcagatcagaattacaagaagctggtttgaaaattattgaagctaatggtaaggataatgttgaaattttaatttctatttttgaagattgtttggctgaaaaggatgagaaatcaaagattcaagatatggttaaagaatcagttattattttatacggtactcttgcacgtcacttagataacaatgatcctagaattgaagccattgttaataaattattacaatcattagatacaccatctgaagatgttcaatatgccgtctctgaatgtatttcaccattagttccattcattaacactaaattatctaaatacattgatgatctttttgaaaaactttttacttctaagagacttgcaattagaagaggtgctgcttatggtattgccggtttagcaaagggtgttggtattaaagctttatgtgaatatgatattattagaaaccttactgaagcctctgatgataaaaaggatactcaaaagagagagagtgttttatttgcatttgaatgtatctcccaagcttttggtccattgtttgaaccctatgtcattgaaattttaccaattgttttgaagagttttggtgattcatctgcagaagttagagaagcaaccgattatgctactagaattattatgaagaatactacaagttacggtattaaaaagatgattcctcttgctattgaaaatcttgaagatattgcctggagaacaaagaaaggttctgttgaattacttggttctatggcttacttagatcctgcacaattatcatcctcactaccaaatattattccagaaattgttggtattttaaatgatacacataaagaagttagaaaagccgctgatgctgcattgaaaaaattcggtgaagttattagaaatcctgaaattcaagaattagttccaactttattaaatgctatcggtgatccaactaaatacacaaatgatgcattagatgctttaattaatacacaattcgttcactatattgacggtccttcattagctttaattattcgtgttatcgatagaggtatgcaagatagatctgctaatactaaaaagaaagcttgtcaaatcatcggtaatatggctattttggttgatactcatgatttaatgccatatttaggtcaattagttgttgaattaaatgaagcagttgttgatcctgttccacaaactcgtgctactgctgctcgtgctttaggttctttagttgaaaaattaggtgaagataaattcccaggtttaattgctaacttactagctgcattacaagatgaagaaaaaccaggtaatagactaggttctgctcaagcattagctgaaatcattagtggtttaggtatttctaagttagatgaaatgttaccaattatcatcaatggtacaacttcatccaaaccgtttgtccgtgaaggttatatgccattattattatttttacctgtttgttttggtagtcaatttgctccatatttatctcaaactattccacctattttagctggtttggcagacactgttgatgaaattagagatgtttccttacgtaccggtcgtttaattgttaataattatgctaagaaggctgttgatttattacttcctgaattagagaaaggtttatctgattacaactcacgtattagaatgtcctctgttgaattaactggtgaattattattcaagatttcaggtattagtggtaaacaagaattagctgatgatattagtttatctaagaacgtttcaaaggctttcaatgaagttcttggtgccgaaagaagagatagtgttttatctgcattattcgtttgtagatcagatacttctggtgctgttagagctactgcttccaatatttggaaagcattggtcgcaaatactccgaaaacctatcaaagaaattatgccaacacttatcagtattattgttcgtcgtttagcttcacctgatgaatgttcaaagaagtattgctgctgcaaccttagggtgatatgattagaagagttggtggtaatgcattagaacaattattaccaaccttaagagagacaatgtacagtagtgattcagatgctaaacaaggtatttgcattgccattcatgaaattattcaatctacagcaactgataatgttattgaacatcaagatatatttgttagtgttgttaaggaagcattagttgatccaaattccaaatgtcagagaatctgctgcattggcatttgatgccttacaagaatcaattggtaattctgctgttgatgaagttattccacaattacttgagatgttgaatacttccgatggttctgatgatgcattatgtgcattacaagaaatcatggctactaaatcagatgttattttcccaattttaattccatcattattaacacctccaatcaatggtcaagctattggtgcattggcagaagctgctggttctgctctttacaaaagattatctactattatcaattctcttgttgacggtattgctgagaacctcggtgaagaatctgatttatactctgctttaacacgtactatgttatctgttgattccgatgctggttgtcatccattaatgcaacaaattttagctattatgaaacatgatgatatcaccaagagaaacattatttttaaggtcttacctgaatttttcaaagaaaccacattggattactcaatttataccgaagatgttgttactagatgtatttacttattaaatgatgctaatactgaacttgcctactaaggcttgtgaaactttaaccattctcatcaaaaagcaatccaaacaaacattggaaagacttacaatgcctgcacaacaaagtttgtcattcattcaaaacgaaacaaaggaaatttttgcattcactttaccaaagggtccaaattgtattttaccagttttcttacatggtttaatgtatggtaatccacgtcaaagagaagtttctgctaatggtatttctattatcattgataacacacctgcaacaggattaaaaccatttgttacgcttattgtcggtccattaattagagttattggtgaaagattcagcggtgaagttaagagtgaaattttattagcattaaacaaattgttcaccaaaactccacaatttttacttccatttattccacaattacaacgtacttttattaaatgtttgtctgatccatctaatgaactattacgtactagagcagcaaaggctcttggtactttaattcaaataccaaccaaaggttgatccattagtcaccgagttgttaaacaatgctaaggctattgattcaaccaatttagctttgaaaactgcaatcttgaaagcattacttgaagttattgatgttgctggttcaaagatgagtgaagttagtaaaaatggtgttatgcaattagttgaagaagatatgtttaatgaagatgccggtgtaaatggtgctgttgcgtatgcaagattagttggttcattatcaaagattttagaatcttctgaattaaacaatatgttaagagctaagattttatcatgtgatttgaatgatgaaaataattctagatttgctattttaacattaaatgcattcctaaaagactctgcaagtatggtcttgaattgtggtttattacctgaaatttgtgaatttatgattaatgcttcaaattctccaaaatcatatgttagtgataatgcagttttagcaattggtaaattcttattagtcacttgactaaagttgaagaatttgatcaatcacaaatcaataacttagttaaacaattatgtgttacaatgaacaaacctacctcaaattctccagatacaagaagattttcattggttgttgctagaacattatgtagatatcaatacgataatgttattttaccaaacttaaatgatattattccatcagttttctcatgcgttcgtgatgccagttcttccagttaaattagctggtgaaaaggcattcttagctgtgttaagattagttgaagatgaatcaaatagtataatgacgaaatgggtagaatcattaaatggtgaacagactgttaataatgcagttggtgctactttacaattaagatcaattactgaatatgttaagagagttggtttaagattaggtaatgtcgaaagagaaagaattagtgctggtggtgataaggaaactatgttctctgatcaatatgaagatgaaatggaaatatgggctattggtagtgttgacttatcagaagaatagatgttgtttactatattagatttaataaaattgttttgtgtttataaatttttatttagagttttttttaaaacttaataatacgttcttagaaaataattgtgctgatggtaacagcagtcgttagaatataaaatgttatttaacaatgtaaaatgaatgtgtatagtataatgctaattatgaaataactttctctatttcgttcaatagttcattacttatttcggaatatggtaaaccacaaatggttgatattaactttttgtaaacagataattttgatttcatcatttttaagttgtttgcgtcagattttgatatagttgagtcaagaaaagcttcatcaaaggaaaaatcattattatttgattcttcatcaatatgcattgtaactctcttttgaattatttttcttcttattatttgcaataatgttaattgaattgctaactccaattttttaccttttggtttcttcaaatcttcatcgatattatcttcttcgttacgtactaacttggcaatttttagggcctgagaacgtccataaagatcaaataaatgctttatttgattttgtagtttggaatctatcttagacaaattttgattgacaaatgatgttatattttctgagtccaagcttgccagtttattaaaatcaatattagatatatcctgatgactacatttagctatctttttcagtaattttccatttttagttgtcaaagacttgaatattggagttcaggttgtttatactgtcaatactataagttaattgatcagttttattttccaatgatgacttcaatttgcatatcacgttcggtaaaccattaacaaaattatccagctcattaaaagaaatatttgattttttaaccttcaaatcttcttcaatagattttgccttatcagctacatcagaaataggtaaatttgattcagctttaattaccttttctttgataactttactaggtgtaggactaagtaatgtatcatttctattgtttttatttgaagtaaaactatttgtcatgatagctatcaaacatcacattctctttatcgccgtcttgatcttcactttcgggagttctttgggcatcaatagtatgaggtgtatctttaactttatacttaatatttgaatcatatgaactttccaaaaatgggttcttatcatctacaattagtgaattatctttgttggtttggctttctttgctaatattttcattatagttatttatattgacatgatctaaaagtggataatcattatttcttcggtaattttcatttccaataaaattatttggattaatattatcctcaaatataggttgattttctaccataacattattttgatttataattgtgttataattttcaaattgttctgattttttgtttaattctttgagtatatcgggatgaatagttatgccaacctccaacttttgaaacatcagctccattttctaataatagtaaaataaattctttacaacttgaacgtaatgcaatatccagtgcactttcaccatttaaattacaatgattaataagaagatcaagtaatttcttcttatcattagtagttctagaatttctttctgcttcattttgttgatctttaataaatgttaaaatattttccagatagtataatgtagctgcgattttatcttcatttgatgataattctgctaaatagtgaactggagtattttgatgagcatcaggtacaattaaacaatgttttaataatggcaaaatttcatgaaagttttttgagtcataagaattgttaaaatgaattagtttagataatgcattcattccctgaatatttaataataatgtatcagcatttaatttagttaaaatttttataactttaagagatgcaagtgcacaagcccaatgtaatggtgtatgaccttcatcatcaattgcttgattaacatcaaaatcttttggtggattatataaaaatggtggtatttctgtatcatcaacaaaaaaacttattaatttttttgtaaaatatgattgattatcaataaattcatcaaattggtgattattattaaaactatttccattatatgcacttaaagctgaatcaattgaaccattttgttctgtatttatatgaggagatgaatgatgacgtgtatgcctgtatatacttcctgggctttgtaagcatatttaattgtgcttttgatattgctggatgtaactctttcttcattattttcatttaaataatttgaatattgttgttgatattgcgtacttgatctaggtctgacaaaactattattaacatctattggtatataacttctatcaggtgatataattgattcattaccaaattgcatatgtgaattatcagtggatacaactgaatcatttagttgattttgaacatatgaatcattttcgtgaatagtttgcacactttgagatctataaaagttttgatgttgcttgtctatcaaatggttcggcatatttaagttggtgtgatgaattttggtattgatgatgtggatgttgattatgctgacggtgttgttgcgcatgatgatgatgtggatgatgatgtggatgttgattgttgttgctgttgttgatgtagtttgtgctgttgctgctgaaagtattctaattcacgttgagctttcaattggtaaggttgaacattatgaccaaaaaatgcagcatccgagttcaatcgattgtttgaaacaggaggagctgaagtgtggagttggagtaaattcaccaaaattttgaggtatatgtgaagctgaccttgatttactatgtaatctaattggagattcattatattgaccaaaagttggaggtaaagtaaggggtaaagcaataggcttcaactcttaaaggtgttgattcttgaatttttttcaacttttgaggagaattgagctttttaggtaattcatttttaatattattattatcattaatattataattgtcagtagtagcaaaggatgatagaagattcaattatttgaggtctcttcttatttaatgattgattatccatattggaagcaatggaagtggaagatgttaattttgtttttgtttttgtgtagtatttgaagtatttgtaagtatttgtagaatttgactgtttatttgcagatgatttatttgatctagtagtagatttaactttcacagcaatttcaggtgaattttcaggatcgaaaaataaaacatttaaattctccctttgaatattatgtttcaaagctaattcttgagcaaaatccagcggtacccacgttccttggaatttaccatgaccaccttgaacttttttagtgaactaattgatgaacttctctctctaaaatacgagttctttgagttttaaggaaaccagcaattttcaaaatttgagttgcattaacccaattatcatcacatcttctcatcaaaggatatccattgattatactttcatagacatctatattagagtaagtggtcttgtatacttcttccattctagaggtgggataaagatgctagaataagaataaaattgagagataatttggaaagtgtataaaaccttatattaaggaccccccagtctgtgatgataactgttccagtgaaaatcatggacaatatactaagatttcccttttcggcgataattcacaattcttacacgcactctccaatttttcatttttcgtgtcgtcatttaccacgattacgtaaggcggctgggtaaatttatcttccaacatgaatttataatccgttccattctgttatattcattaatctttcttgtaattctactggtattaagcctatagaagtatggataacgggaaaatatacatgcatgacggtgccgttcaatcatcaactcaggctttgactgatccacccctatattctatctttggaggaagaaatatagtcttttcagaaaatcaagatgaagatttaaatttatacaataatcttaataaacttaaggaaaataagatagaaaatcagacaacaactcaaattacctataccacagtttacagtacaataaatttcaataacttttttaaaactttattatttggtgttatcatattctttcttttcaataatattcatgaaaataatccaaatataattccagcttttactacacatttcttaaattttatagtatcatatgaaagcactaaaggtttactatcgatttttctgttaaattcattattacttgatgtttcaattttaattataggtttattcttaaataattatactcatttgaaaaataataaaactaatcgttcatcatttgttcaactgattgttgcacttattggtatagtttattgttttcaaaaagttatcttggaattcaacatatcaagcagatttattatttattttagttaatgcaatttttgttaaatatactgattgttcagttactgaaaatttaacaggtatgattatttttttatcatctttattatatgattcattatttaatgatattaaatcattagatattaacctgtggagagcttgttttatgtttttaacatcaatagttttaatgaaatcaaagaaaacaaatcatgtattttaatttgcattattattctgatttctccaaggtaatgaagttatttacttaccccatattcttttctttcttctacgtatataccacatatttacattttaaaaaaaatatattttcgacgaacaaaatagcttaactatcaagattattataattataaaaaaaattaaaaaaaggttaaaaaaaacgtatactaaacgttacaaaattattatttaatgaaaatatagccacctaatgtttcaaaattatgttgattgattatgtttttgttcttaataatatctaactaattagatacatcagatacatcttcttctaattttgatttatgagtaacgggacttgagacactgccagcagcaactgaatttctattaattctagcaacattttcaatttcagggttatgtaaaggattcaatatccctacttgttcaggttcatcaactttaccatgagcttttgacattgcataatcacctgaatcgaaaaatttcctatcctttaatttaccacgtaatatatcattagtttttggtaatttcccatataatttatataattttaattcttgtggactcaatgatgataaatcaacattatttgttggtggcgtgtatagcggatcgtttggagataaattactcattgtattgtatgttctaaatgatattcagtgactaatacttattcaaagacaaggcacacattgtgccactcatctccttataagcctttaatagctcaaaaaaatgaatcatttgccacccgcgaacttggggtaattcaaattcaaatttcaattattttacgtccccgggtaatgcagagtcgcgtcgttggcaatgttagtggctcatctattttaaattgttgatgcttcatcatcatcttcttcttttgcctctggaagtatgtgcacagttacatgtagtagttgggatagggggagtttgttatatttcaggcgtttagagattgcactaagtgtagagttttcatctgcaattaaggaaatatatttattttctaatatttgaattcttgaaaatgtaacagcttttggtaaatcaattgattttaatacattgtcattacttaatgtatctattaaggagttcatttcttcagttgataatgacatattgtaacataatgttaaatgtaattcatttggaagtttggtcaatggatttattaggcaattcacatctattctaatatctgatttattttcaaattgattaaaaatttgttggaaagttttcaaatcatcattactaggctctattttcaaataaatgaatgtagtttctgttgaattgaaattagttggaattttatttgcaaaaagtggagttttggaatatttattgaatagaatattagatggtgatattaactctttattgttattattctcttctttgtcattatcttcatcggaatcagaataatatggtactaaagacatacttcataatgtagtgtggtgctctactcccaacggaatttaatctacattaaaagttcagtgaaaactttaaataattacgttatcgatgcgtccagtcgtcaaaacagagatgaaaacaaacgcgctaacaataacatgtaattttgtttacttttcaaaattatcaaaagattaattggttcaacggtttaatcattctgcagctgtggttatagtgctttccaagtacaagcaaacattatctccaattaacaaaacaattaatttcaatcttttttttctgaattgaaagaaatatacaatagatatagaaagcaaaatattgtctaaataaccaatattggacaaaaaataatttacattttcaaattcagcaattatgtacactggatctacttcagaattccaaatatacaacgataataataacagaagatcatataatccatttattgcagattcatttggaagtcaatcatcattaatgacatcagattcagatgaaacgtatgataaatatgaggaagaacttttcaataatggtaatccatttaaatcacccacaactccaataactccattgactccaataaataataaaaatgtttttaatattaatggggatactaccattaatgaaagatttatgaaacggccatcattgagaatgcttcatgatgaaaattcaaatataataaagtctccaataaatcgaataacttcaagttataataataaaaataaaaattctccaattaaatcatctaaaacatcaatttcatcactatatgatataactaatatttcaagtgcctagaagttcaatacgaaataataattctaatagtaatttaagatcatattctttacataaaaatgatagtacattatcgattgaacaaaagaagaaaaaaattataaggaatttaaataagagaaattctaaaaatttaaaaaatccatatttttatcaatatgataaaagtgaaaataaacaaccaaatcaaaaattaccaattttaccaataacacctattgaagataatgtgaataataaagatttacaaactcaacaacgaatagtggatttgagtgaaacttcatcattttctgaaatttcatcaaacttattaatgcatgatgattcacttcattttgttgatgataaagtaataattcaaaattcatttaggggttttagtggacggaatacgaatgtcaatcccgggaagaatcccaagaatcaaaactcaaacaataatgaaaataataataataataataataataatgatgataattttgaaaaggatcacgacgaaaagtaatgggaatagaactggtaatgatgcaggtgagcctaatgatgatagtaataatactcagggagataaaactaacgataacaacaacactacaagttccggatcaacagataccactgaatcttcagattctctaaaagatgtatactaatagaaacagtactgcatcagtgattaaacaagcgcagagaagttcattaggattatttgttgaatttagtcctactaaatccctatcatttactggtttgaataacaggaaaagttatattgaaaagaataaatcatttcaaaattcaacaagtagacgtgattctgagattacagttgcaacagagaaattaaattttgaaaaaattgatccaaatgaacgaatatcatcaattaatataagtcaaataaaggcatcaactgaattatcacttgattctataccggatgaaaatgatgatattgaagatgctataataaccatcaaaaatattaatgaacatgatggtaataaggaatcatctgatggtgataaagaaagtagtgataatgattataatgaaccaaaatttaagaaatttaatttgaataatgattcgactgtttcatctgtacatattcctaatgaaacagttccattaccggttaaaacattaaaacagaaacgaaaaccagttccattaccattgaataaagcaactccgaaaattccagctttagatattaacttatccgaggaggaaaactcaatcggctatacatcacagggatcaagggaagagttattaaataatgagaaaaaagttcatataaatgataacgaaaatcacagtcataattctgaatacgatgaaaaatattatgaatctaattatagaaccaaatgtagtgattcaattgcaattttattaataattttaagtataattgcaccgccattttggttgatgatatttatgggtaaattagattcaacatttggtaaatttaataaaactcaaaaaataattagtctaacaatgttcatcatattcaccattggagcaattattggaatagctgttggatttggatatggtttgactcataagtagtaagtagtaagtagtaagtagcattaattaaataaattgtataataaacgttccgggtccaatgaagaggcttattcgcgaggttttaaagctgttttagtagggggtgggtaatgggcggagggtattcgggaagataaggagaggtattataatataacttgtaactttgtaatacaatcacccctgtttttcaataggaattgttcttttctgtatactcaattaataaaacgatatggggaatgtacctgggaaggaatctaatggaaataataatggtaatggtagtatgtcaacagctgcatttacaagagaatttttaggtggtgatggtaatttaaatgggcaaattactggtggattaagatatagtagtagtagaaagggtaaaaatttcgaagatccagttgttaggcaaaggaggaaagatagagagattcagaagaataaatataggaataaacaaataatgcatttagttgttaaaattaatgaaaatgttgatggaggatatttagctccatatgattgttataaatatgaattagattatgaaactgatattgtacgtgatttaataattaatagggaattatcaccattttttataccattacaagattttaatgaaaattggacaaatgatgaattaagttaattatattttaaataatattaaattacatgaaaatattaaaccaggagatttagaagataattttgaagatcctaatgaacatagattacatgtatctgcaagttcattaaaacgaaagcaaattaagattcaaaaaatgaaaatgaaggagaatgcagctgaattacaaaatactgaaaatattaaatttttaaaagatattaagaataaggaaagggataatgataataatgataatgataaatatttacaaataccatcaaatgatttattaattaaattatataaagatagtgaagaatgtccaatttgttttctattttatccaaagtatttaaatattacaacatgttgttcacaaccaatattgtagtgaatgttttgttcaaatgaagagacttgaaccacatttcccacatgatgaagaggataataatagggatgatgaagataaagatccaaatagtttaattagtgaagttgttaaatgtccattttgtgcaattagttcatttggtataacgtatacaccaccaaaggatattagtgttggtattaatggtaaatgtttacctggagagtatattgaaggtaaagataatgatagtaatgagagtaataatgatgataatgacaatgataatgataatgaaagtaatgagattacagaattagatatggaagatccatttactaagaagaagataccagctgttaataataataatattattattaatcataataaagaaaagaagaataaatctccaacaattataacaattgatcaaattcgaccagattgggaacaaaagttattaagtgcacgtactaaaatggcacgtagatcagctgcagcaacagcactgcatgcaacatcccttttacaaggacatagtgggcataattatagtccaaaccaaagtccgaacaataataataataataataataataataataataataattataatttccgaaagtaggggtgatagtaatagaaccagtggtagtcaattagaggccatactgattgaggaagcggttaggttatcattactggatgaggaagagcgtaagttacgagaacgagagaaggagagacgtaggaagtaagtaaagagtactaataattatgtaatataccaagagtcataaaaagaaaagacataatgctaagaagagcgcttaaatttgtgaaaattacttattacgaatatgaaaatacttagtgagaaagagaaaataatggtgaaaatttgacagtcgtcatttctgacactgtctttgattgtatttgtgtataacggtttatattatattattattaacttattaacttatatccgtttttgtttctctttctctttctcttctcttcctatctctatctctatctcttttattaaccacaactggagaaacattatggattctgcgtccatctgggacatttataacacagctactaaactgttacccctatctgaaagaatgaataatagaactgttcgtcaacagtccgctaatattcaacaattaaagagaaatacattaaataataataataataataataataacacctctactataatgaatagtttgaataatatcaataatgaggatattatttctatggatttactcactccattaacttcctctccggctacttcaataactaatgctttgaagagtaataataatagtaataataataataataacaataataataatgtcaataacaataacagtgataatgatattgataataatactagtattactaataacaataacacttcaaataatactactgacactattaataataataacaataataacaacacaacttcaaaattaactccaaattcattaactgaaagtccaacatctgctacaataataacttcaaatgatattaagggtccatcatcatcttcaacatcttcatcttcagctttttcagaattaactaatattaataatcaacttcaatttagtaccttcaaatattgataataatacagtatcttcaatagatccaaaaactacttcattatcaacttcttcaaatcatttatattctcctacaaatttaggtatgaatattggtattgatatggatattaatatgaatcaaaattatgcttttgctgatctattagattttaaaaatgaaatttcaaatgataatgattctgataatgttcataatgttaatgataatgataatgataatgataatgataatgatattacaatgaataatttagattttgatgttttaagagaattacaacaaattaatgattcaacaatgctaaatttaaatcatcttaatcataatatgaataccaataataataataataataataatatgagtatgaatgctgatgataaagaaattaaaactattaaaccactagatatcaaaatcaaatcagaaacttctgtttctttaaataatcaaaatataatatcaaataatgacacaaaaagtaagagtaccaataataacaataacaataataacactatcaataataacaccattaataacaatatgaatgaaatcaaatttgaaaaaatcaaaaaaccttcaactaaatcaaataatattgatataatatcgggtaaaaatattttatcttcaacacctcaacctaatgaattacaaactcaagcaagacaatcaaataaaaatgtttcatcatctgttccaactaaaattgcctcaaaacaaattttaacttgtaataattgtggtacaactaaaactcctctttggagaaaagatcctgatggaaatactctttgtaatgcttgtggtttattcttaaaattacatggtacaatgagaccattatctttgaaaactgatgttattaaaaagagaaattcaaagagacaatcaatgagtgctcaaggtgaaggttataaaaatttatcaacattaacacaaaatcaattgaaaaatcaattacaaaataataataacaatattaacaatattacttctaataattcatcacaaaatttacctgatttgataatagcttcacaatcatatcaatcaccaaaatcttattcattttttcctcaaagtgtaccaaattctcaaactttgaaaaataatagttcaatgtatcaaaatcaaattcagtttaaatcaaatgatcgacatatgaatcaatcatcaaatattccaattgcttctaaaattataaatataacttcaaataattcatcaacctctctttcacatttatcaaattcaaattcatcattatcacgttcgaaaaatgtaccaattttaccaaaaccttcaaaagattcttcatctcctggtactccaagaaattcatttaatttaaattcatcaatttctcaacctcaagatataccacaatttaagagaagaagatctaaattaaatttatcaacatcacaaaattctcaaccatcatctccttcaactgctgtttcattttcaccttcatcatctgttgcatattctccaataaataatataacaaataatcaatcatcatcatatcattcacctgttaataatattaatccaagttcacctgctaatagtttatcaatgtttgggaaaatcaaattcaagacataattcaatttcttcagcttcttcatataatttatatcaagatattaatacaaaacgtggattatcaagtaataatattgcacaattaaatacatataatttaacttcaaatctcacaaatggtataattaatttatcaaataataatatgaactcgcccaatagtccaggttctctacctaatcaatccccgaatggatttttcaataatagtaataatagcagtaatgcaacaattaatggaaataatacgattaacaataacaataataatacattcaataataatactaacaaatatccaatacagagagaacaaaagatttctaattttagtaatttaagtgcaggtataaatgctatacggaatactagtgcaagatcaagtttgagtaaatgtgttgctaatggtaattcaccatcatcttcaacaaccattaaaaaatctaataaaccaacaccaaaattacaaaatgctgaactaaattcaactgataattctaacaacactaatactaattctaataatactaatactaatactaatgacaatggtggtgatgaaacaatgactgatttagactggctaaaatttgatatttaatttactaaaagataataatgataataataatatatacacttttcacattttctacatacaactccatttttaattaaaatttcttacttaattaatgtttttctttataactatacatttttataaatatcgttttctaatcaataatataagtatattaactctacagacatgtatatagacattcttagtaaaccttacataatattttctactttctcgaattttctgtagtaattaatttgaatttgacatgttcaaaattttcaactgttagctgaacaatatactctttaattagacaatcgacaataatgtattacggtggtcgtggtggatataacaacaataataacaataacaatcgtgcaggatataattttccaaatggtccaagaggaggtaataataatatgaatacttttaattcaaatcctaacttatgttacagttgaaattcaaggttggaataacgcatcaccacaagaagtaattagctttttaaatcgtaaaactagagttgaattgtttcttggaaatgttgttggtaatatagtacaagcacaagttaaaactatgaaagatgcatgatataattgcaagatgttcaggtatgagatttgcaggtcaagcattacattgtcgaattgctaataataataacaataataataatcatcataataatagtatgaatggatgtggtaatcctgcagtaaatgcagctgcttaaagatagtactattaccatattacgaaatttcttaatatcaagatataatcaacaaaataaaatgcttagacttacaaagttgtgaaaatgatcaagttttagcaagtaatggattattttcaaattcttcaacatcatctaaattttttcctgcattaatgaaaattgcagaacaagaaaaacttgatgttgaatcagttaatttaagtggtaataatattaatgattattcaaaatggttaagtgatttatcacatagtttcccacatgtcaaaaatattgcaatggcaaataataatgtaaagaaggattgaattctttgataaattgaaaaataaatttaattcattaagagaattaattattccaaggtaatccaatttcacaaaatatgacattagttcaaaaaattgttgaatttttcccaagattagttataattgatggtaatcaaggtaagagatgaacaaaagattcaatcgtattttaacattcccaattaaatcaacctaaagtattttttgaaaatgaagatttttctaaaatttcaactactttcctaacatcatatttaaatttttgggataataatagagtagacttaatgtcattatacacaccacaatcacaattttcatatcaatgtgattcatcagttatttctgattttaatgcaaatacaccaacgaatttatggaataattatacaccacattcaagaaattttaagagagtctcaaatgaaaaatcgagatcaacctagattatcaattggaccagaacaaattttaaatacttttaaatgtttaccaaagagtaaacataatttagatactaatcctaatgaatattcaattgaaactgtttcttttccaagtttaaatggtataatgatttcaatacatggagaatttgatgaaattgcacaacctgaacaacaatttgcatgaaaattcaaataatgttaataatagatataataagtataataataaaaacaataaaggaggtagtttagaaaaaagatgttttgatagagttttcattgttgtaccatggacctaatggtgcatttattgttgcaagtgatttattatgtgttaaacacttattcaaagaagaagtcatggaatattgttgataataacagtacgaatattaataataatgcagcaattccagctgtacttacaccatcaattacacctgttaataatggagtttctaatgccaccaatgaataattcaacaattcacaaattcattaccaccagatattgcaagtaaattaaatataacacaacaagaaattgtaatgaaagtaatgcaagagacaagattaaaattagaatttgttttaatgctttgtgaacaaagtaattgggattataacacagctggtataaattttacaaacagtaaagcacaaatcccacctgatgcatatttacaatgattgatagtcatactgttttgtattgtatataaattttatatgttaaatagatttaacaattataattataatgattaaattaaaattaaaatcaaaatgaaaaggggaaactttaaattgttaacaataagttttgtacaagaaggttttcttcttaaacggttaggaaactagtcattgcttaatgttcattgctgattatagtaaacaatataaattgtattcagagaaagctgtaaagtattcaccaacaattaactatcctgtaatagaagatagtctgattataggtaaggctaaaatgttgatgaatatttataattgtaatttccacaaacacactcgtaaaccaatgttaacttctgatacagataacagttgggatatttatccattattagaggctgggaagttaataaataaagaggaagttgaattaaaggttcaacttgagaaatgtagtaatgaaagcttttcactttgtagtttttatggtacaaattcaagttgtgattctgaatttaataaagataggtaagagtgatactaatgaaaaaacctttttgtattaattttgtacagtgtaataataaaaagtgataaagtaagataataaaatgcagttttgttaaataaatataggagtctataaaagatgagatgtagtaaattaatggacactaattaaaatatgaatcactacataatattggcaatattaatacctgaaatagttaatattaaccaagtaataacaaataaaattcactggagcaagtagatattcagttttctgtaagaatggtaaagcattataaccataaaatgttattaagaaataataagataatgcaatgaaatataatgaattaccaataattgttgaaaaaatattattcattgtaatcaatgggataaagaagaattgaataaaatatagacataaccatattattaaataagcattacaatgaacatcaaaacaatatgaccattctaaaattgaatcaaatactataaatttatgaataaaatttaagattgaattatttgataatgattcacccattatatgagcatctgattgtaataagaatttattagctaaaatccatccaattgttgcaataattaaaccaaataggataaaatcgacaattaccatataaagaatcaattttaatatacctaaaacacctgaagtatacattaacccccaaaatattgctgaaattataagtaaaaagcatagaataagtacaaaacttggatcatctcttgaccatttattctttgtttgcttttgataatataatgatttataaacacgttttggactatgtaataaatttaacatttcccaaaatgcagtttcaaaatcaagagaattaaagattaacatacgtttaaaatatttaggtactttaaatcttgtatttaaattttctcgtattttctttaattgagaacgttttgattgtctttgagcataagttgaaacagatggtattgaaccttgatttgaactaatcattgaaaatctatcattttgagatgaatttgagacattgggtaaatttttaggaatatcatccaaagttaaaggcagtattggattagagtcgtttctcttagacattgcggaaaagcagaattgactagttagctatggaatagtaagtaaatcaggataaaataagaaaaatcagataaataaaaccacatgtaaaccattcaaaatgaatttcatgcacatcatgtatccaagaactcaatggaagtggagaaaaacaaaaaatacaaaaagggaaggtgtcgcgggtgaaagatataagtggaaatactgacggatattaaatgaaaattttattttattttattttatcctacttagtactacatattttagacgctaaaaaccgcgatttttttttatttcctgaataacatctttaggactttccgcactaacaaatgtagccctttttcttatctgacctctagttatcgagttatagccctttgaagttgattttttcgatttttcaaacgttcatatctttttctttatgggtcattgaaacacgcttaataggtcattggatttggaattgtttgaagtttatttagtaatttacttgggatcattggagctttcctccgtccttgaaaggaatttttagttttttgactttttgtccatttttgaccactttcaattgactctggctccttcaattacccctggaggtatacttttgaaaaattctgtgtgtaggctgtattactctctttccaatgacaccatttttagtttttcaagtaagggtaaagttcattaaatatccatttttcagtgatttttgaacgttttttttagaaatttttcaagctagcttttttgttactttttgttaacaacttttaatgttcagaaactcattttgtagatgtgtttttaaattataaactgatgtaaaatatgattcgaaatgttttttcaaaaaaatgttatcattaaatatgtgcaaattttgctctttttttttggcaaaaaatattaaaacgatgataacttttttttgaggcaaaattggagatgggatatttgatattttgtagagaaattttttctctttcgtttggtactattcacgtccgatttaaaagagattggaaagtgtagtacattaaattaacgctgattttaacgcttttcaaatagttatagtgatagttgattacgtaaacgcgtatctaaaattcatgtacccattttttcatgttacaaatttatttcagtgtctacagaattaatggattctttacggtttacatactcaaaggtttactattgtagtgacatttgttattattagcttgttatcaaaaataaaatatgtagtagtaagtaggggtcaaaatttcccgtagggaaattgaaattaccaaacccaacgctttaagcgtcagtttccccttcaggggaaatgacaaaagagtcgattaggttcgtcacgcggaaactagttttatttaatttatttacctcattagttatatattttgcttattaataattaaaagtgattaattatacttatcttttaatttattttcatttacttttatctctttttcttatcttcttatttccttttaatttacttgattcttccgtaaatatctttcaaagagtaacaattatggtgcaatttgacttaggtaatctttttcccagtgaaagattattaatttcaaattatttgctcgatatctataataacaccccatcttctgtagagatactgaaaaagggtaaaaaattagttccattaactcaatgtggttgttatgatggtgaaggttatactttggtatcacatttatctgatccttctccatgtctcttgaatggtatatttatgtcatttttatcaatttattgtattatttcatcttatttaacaataaagaaattaagatcttcaaaaaatatttcaacaaaagcttcaaatatttttatctttaaactgttaatgattgcttgtcaaattttcattcaattagctattattatcgtatatgcaagttcaaatcattatgttgttcctaatgtctcaatcttccaagattcagtctttttatcatcagttttaacattaatttcaattttcacttgtttcactttatcatatattgaaaattataaaacttatgttgcacaaactccactgattgtattttggttcttttccactattatcggttgtttaagaattgttaattcaactttaagaaattctacatcatttgaaattttcttaattacttcattcacaatcttatcactcttaattctcatttttcgaaattaattttggtcctgttttaaacttagatccaacagaaacttttaatatttatgattattcaaatattttcagtagaatatcatttacttggatgactccattaatgcaaaaaggttatgaaaaattccttttacaatcagatttacctcctttaccaaattttttgagaactgatgttttagctaaaaatttagaacaacattggacccaacaaattaacatttcttcaaatccttccttattaaaggctcttacctcctcatttggtggtccttattttgttgcaggttgttttaaattcattcaagattgtattgcttttatccaacctcaattattgaaaaatctgattatctttgttaacgattattctcatgatacatctattccattgactagaggtttcatgattgtttctgctatgtttggtttatcagttcttcaaactgctgctttacatcaatatttcgaaaaagtttatgatacatcaattaaagttaaatccgctcttacttcagttatttatcaaaaatctttgaaactatcaattgaagctaaaagtaatcaatcaactggtgatatcgttaatttaatgtctgttgatacacaaagattacaagatttaattcaaaacttacaacttatttggtctggtcctttccaaattattctttgtttagtttcattatacagtttattaggtaatgctatgtgggattggtgtttttattttggttattactgttccattaaatactaacagttttcaaacatcaaaaaaatttacaaaaatctcaaatgaaagttaaagacgaaagaaccggtcttatctctgaaatgctgaataatattaaatccttaaaactttatgcttgggaaaatccttataaggaaaaactgacttatgttagaaatgaaaaaggaattgaaaaatttgaagaaaattggtgctttccaagctttaaatcaatttatatttaattctgctcctttccttgttagttgttctacatttggttcattcattatcttatataaagatcaacctttaacaactgatcttgtctttactgctttagcattattcaatttattaggtttcccgttaatgacattaccttggacaattggtaatattattgaatcacaagttgcattagatagattaactaaattcttaattagtgatgaaattgaagatgatgtcgttaatagatatccaccctgtggaaagaaatggtgatattgcagttaaaatcgataatgcagatttcctttggtcaagacaaccttataaaacagctttagttgatattgattatagtgcaaagaaaggtgaattaagttgtattttaggtaaagttggttcaggtaaatctgcattaattcaagccttacttggtggtttacatagaactaagggtaatgctagtgtttcaggtactgttgcttatgttccacaaactgcatggattatgaatggtacaattcaaagaaaactattttattcggttgtaaatatgatgaagaattttatcaaaaaactttaagtgcttgtgctttgttatctgatcttgaaattttaactgatggtgatgcaactcaggttggtgaaaagggtattagtttatcaggtggtcaaaaggcaagattatcattagctagagctgtttattcaagagctgatatttatcttatggatgatgttttaagtgcagttgatgaacatgttggtaaacatattagtaaaaatgttttaggtccaaatggtttattaaagagtaaatgtaagattttagcaactaatagtatggcagttttaagatattcagatcatatttcacttatggttgatggtagaattgttgaagcaaggtacatatgaaagtattaaagttgataacaaatcaccattattgttaaagacagttactgaatatggtcgtaaatcaaattcaaaagattcatccgatagtgcaactactgcagttgatgaaattaatgaaccaaaatcttcaatttcaatggaattagtcaactgaaccttcaagttctgtaactttaatggatgactgttaaaaatgctaaggccgattatccaaaggctgaaatggaagatttcaaaacagatattattaatcaagaaaatattcaagcaaatgctggtagatctgaaaaacatgaacaaggtagtgttagttgggatatttatatgacatatgcaaaagcttgtggtattaaaaatgttatctttttaattagtttaattgttttagcaatggttctttcagttacttcaaatgtttggttaaaatattggtctgaaattaatactagagtaggttcgaaatcctgaaccttggaaatatttaggtgtttatttcttattctgtttatctggtgttactgttacagtttgtacatcattagttcaatggttattatgttcaatttctggttccaaatatatgcatgaaattatgttagcatcagttttaagagctccaatgcaattttttgaaacaactccaattggtagaattttaaatagattctcaaatgatatttataagattgatgaaacattatttagagttttctcaatgttctttggtagttcaattagagttacgtttacaatctttgttattatttattcaacatggcaatttgttttctttgttgttccaatgtttttcatttatagatactatcaaagatattatttatatacatcaagagaattaaagagattagaatcagtttcaaaatcaccaatttttgcacatttccaagaaactttgacaggtgtttcaattattaaagcatatgatcaagttgatagatttgaatttttaaaccaatataaaatggatgttaatatgagtgcatatcatccatcagttacagcaaatagatggttagcagttagattagaattattgggatcatttattattttaggttcatcaggtttattaattttaacattaagatcaggtaaagttacaccaggtttggttggtttatcagtttcatacgcactgcaagttacacaagcattaaattggattgtgagaatgacagttgatattgaatcaaatattgtttcagttgaaagagttatggaatatgcaagtttaccacatgaagcacctgaaattattgaaaataagagaccatcaactaattggccatttaatggtgaaattgaatttaaaaattacttcaactaaatacagacccgaattagaatatgttttaaaagatattaatttatcaattaataaaaaggaaaaaattggtattgttggtagaactggtgcaggtaaatcatcattaacattagcaattttccgtataattgaagcatataatggtaatattgatattgataatgttaatacaagtgaaattggtttatttgatttaagatctaaattatcgattattccacaagattcacaaattttcaaaggtacaattagatctaatttagatccaattgatcaatatgaggatgaagatttatgggcagcattaaaattatcacatttagattcacatgttaagaaaatgtatgaagaatttgaaaataaggaagaaattggatttaatggattaaatgttgcactaagtgaaggtggatctaatttatcagcaggtcaaagacaattgatgtgtttagcaagagcattaatcaaaaagaattgtaaagttttaattttagatgaagcaactgctaatgttgatgttgatactgattcaattgttcaagaaactattagaactgcatttgaagatagaacaattttaacaatcgcacatagattgaataccattattgatagtgatagaattattgttcttgaacaaggtaggattaaagagttcgatacacctgctaatttattaaagaagaaagattctctattctatgcattatgttcagaaggtggtttaattgataatgaatagagaaattgtatttccccattataattattataaaacatttaaatttaaaaaaaaagttactaattaattagtttatcatacattcttttcgttttttagttatttagataaaagatttatatatccacatatccaaataactattagtatttataaaacttcccagtagtttgcatatgtatttcaatgaatattattgattatatatactatgattatttgttattacgtctcatgaaaaagctggcaataccaactgtagctgcaactgcagaactgattattgcaaaaccaatcaaactatcctttgcaagttcattttctatcatttttttcaattttattgcatttgtattctctggttgatatgttaataatgtatcaatatatcttgtagcttcttgatattctttaattttaaaacatgcaagtgataaataatatatacattcagttctcctacttggcgtcgttttaaatatttctgttattatattaattcctgtcttgacatcatcattatcatttgactttataagcccccaaccataattaaattgactttgagttgttgcaacgggctgttcggattccacttgggcctcaagaatggccaattgttcctcacttaatggaataaaaccttcctgtggtgatggaaactcgttaaacttcttcatagatgcagacattacttatttgattacttcacagagtgatatcttaacctatcctattccaatccagtccaatttactgataaacagagaaacccctcaaaaggttaaagtaatcaaataattatttttttttgttgatgtttcaattttgacggtttttttttattacttgatttgatttaaagtgtcttttcttatcttttgttttcttatctttgatgtattaatttattgtatgtctttattttgatttgagtttatattcttcttctttcttcaattaacaatgtcttctcttaaaaaacaaccagtgaaacaagcaactagattgatggctgcaaccgcaaactgttcagaactatcaatcgcttatggtaaatgtattgcaagtaagtatcaaaatatgtccaaggatgcttgtttaaaggaattcatcagcttcaaaacctgtgttcaacaacaattagctagaaaggtatgattcaacaaattacatttctttttataatttatttttaatgacatacacttatttcttctacattattcttatggtttggtaatcggggtatattaccaattttattttctactttgaagttcgtttccactatatatataatatacaaatacacttattataactaacatcttacagtaatcttcggaataatataattgtattaaaataaaacaaaaaatgtttataaatttgttagtataattaagtataatttacaaaatgttactactgcacgctccaacttcaaacttaattaaacaagagttttaaagtctctctttaatctcttaaacttcttgttactcttagttcctttcacaaatctcttgattaatttagcaataatatcaaagaagtacttatcccctaagtataaacttattaaattaacaaaagcaccaacaaataaccacaatttaacttcaaaactcatccatgttaaatccattaaatctccaaaattagaggatggatcaactgtcatcaatccgacagatattgaaagctcaataataatagttataataaatggataattcttagtaacttcctctctatatggtggaccagctgttaaaattaatgcaattaaaatatattgaaaatttgaaaagaaaaataataatgtattatcggtactttgaacttgatcatcagttcctggaattggttcaatataccatgggaaattttgtgatttaacaactttccatgctataaattgtcccagtaaaagtaatacaatattacctaataatggaataataatctttggggatattaaattagctgttggtttcttagtgacaattttatcatatggttttgaccatgacataaaaacagctattggtataattaaaaataaatcaatataaaggaattggaaatctccaagatttgatccttccttgtacaacaaagtaactgaaataaattggattgctgaatataatgacatatattggaaacatgaaaaactagtaactaatgatgatctaccttctttgataatatctaaaacacatgaaatttcaaaaacatgtgatgtaaatggagctgcaactgatgcttcagcttcacttaatgaaacaccaacatctgctgcctttaatgcaccacaatcatttgcaccatcaccgcaaaatccaactgtataatcaattttttgtaactgattgacaagttcatgtttttcatctggtgacattcttgcaaaaattgaacatttcattaaaatcatttcaataaaatattccatgtctactaattctgttaaaataaatttgaaaacatcacctgtaattgctaaacaataattatcatcttgatttatatctaatggtgataatgtaactctatctaattgtaaatcaggattatcaacttctgaccaaataataggtggtatatgtgtattgctaaatctgccttcaatttcattaccatctgcatccagataattatctgggaaactttcgtaatcaaatgttgggataaaaactttagaatttggtttgataatcttacattctctaccaacactaactgctgttaagatattatcacctgtacacataacagttcttaaatctgcatttgttaattgttcaattgtatccgtagtagaatctttcaacttattctcaaaaacaataaaaccaataaattctagatctttttcaatatcatctcttttcaaatcaccaacaaatgataaatcagtcggattcttagttggattttttaacttcttagcagcacacgcaataattctataaccattatgtgtgtaattgtataacaattcattgaaattatcaggaatgctatctggtatacaaatagtttcaataacttctggagcacctttaacaaaaacatttaattcgtcttcatcatagtttgttgttaccagtatttgatttcaaacaaattactgacattcttcttaattgtgaaataaactcaaattctttcagttgaacataataatcagaaacattattctttgtaaataaaatcggttgtgccaatgttaataattttctagaatctaaaaagtttgataatatctacactttcatttctatccttcaatcatatcccatccaataaattcaaacatattttcatctaatggatcaccaactggtttatcgttaattttcttagtgaatgacatgataacattgatgcgaatattttatctgaattaaagactccactattttcaatatcattagatttcttgaacatatcagtaaattcatgaacttttctatcattaattggtttagagatatgaatacccataatatctaatgattcttcagttaatgtaccagttttatcaaaacataaaacatcaagtttaccaccaatattaactctcattggtgcaatacagaaaatcttactttgacgtaatctggttaatgcaaaattagttccaattgttaaagttgcaggtaatgcaggagggacaacaatagtaattaaatccaatgctcttaagataataactgaccaatctaatcctaatttaataaaattaattgttgaaaatatgaaaccgatacatgcaattcctgtcatgacaccaatatacttgaatgaatcttcagtaaaatttaaatccagatggtttagggaaataacattgatctaacaagagcaccttttgtagtattgaatcctgttctcactactagtgcggttgctggatcattaccattaccatcttcatgaaacaccagtatctaactctaacaattttagtaccattatataagaactgattttgaaaatttatttgaaaattttgtatcattaaactcagcttcaatatcttaaccgattctgaggaaattgaaattttagaaactggaacagattcacctgtaagcattgcttcattaacaattgcatcacctgataataaaagagaatcacatgggaaaacagttaatgaaggatcagaaacttcataaatatcacccggaactaaatcatctgaacaaatttctttccaaaatccacttctccaaactctaacatcacattgaaatcttgacatttttctcattctttttaaagcggatcttgtttcaattaatgattcagtgatggagaaaactgatataaggaaaatacagaatgcataataataatagttatctgctaaccataaaaaaattgaaaatatttggaaaacataaaatgggtgtaaaatttcatcaactaataatttagagattgatttttcaacaatattgattatattatcaccaaaaatcatttttcttagtttataattagtttcagtaataccatcttttatatcaggataatgacaccatttctcatcaatccagttggttggcaatttaaataaatcatccagtggatcatagaataatttcatataacgatattcaaatgagattaaaataggaacaattggatctatatcgtcaatagtaatatgttttattactcattcctgttcttctactgttatatgatttagtgtcaatattgttatcgttattattattagtgttattattattatcgcttatttacttcttcttcttcatccagtgattccactttcttaggtaataagaatgtactcatatttctattataccattttctatcaacagttggcatttccaaaagtccatattcatcttcaacgactaaccattcagccttagctaatggaacttcaacacccattagttttattcgccatcttggagtccatctgaaaattaatgcagctaaaccaaaagttgaaatacataagatataatataatataagttttgaccaagttgtttgataacctgcaataccaacgactaaatcttcttcagcaatataaaatcgttgatttttattctttgcaggaaattttttaaagaataaatcatgtaatttcagtgattctctctttttcattgttttctcccattcctttttagttatcatatcttcataaccttcataatcttcatcgccttcttcgccgtaaatatgtaaatcttgttcttcatcagctatcaattcacgttctgcatcacctctgaaaaattcactgtaaggattttcatttatactaccataagaattatctgaattattacctgacgcattatcatcattaactaatttagattttgaagttggaaaactttgttgatcataattttcatcaattgaataagcatcactgggataatcatcagcaaatgaattccaatttgtatcataatcaattttaacattctctaaatgattattcattcttgaagatacacccttcgctgattcgatatcttcagttttaaaaaatctaaaattagacctttcatgtaaatcatttgattcagattcatatccatcaaatgctaaattttcatcattttcaaatgatgttaaatcatttaaactttttttatgattaatattttcaaatgtatttattgaatcactatctagcattaattgatcaacatttggagtatcgatattttgactaattaccgaaggtgatcttaaatgactatgatgatgaaatgaatgaaattgaacttggaacaacatttgatgcagcccctgaaaacatttcggtattattttcatctaagtgattcaaattattagaattcgaatatctattagttgaactagatctacttgatctacctgacgtcattgaatctctatgtctggaaataccaatactatgatattgttgattggattggtaggaggtagaaaccaatgaaggatctgaatgatcgaactcaaaattattattattattatgagatcgtttcggcattgataataatcacacaacttataacaggctttctttagtataattacaatacaatagaatgtcaacaggtataataattccaagataaacttccattaatcgataatataacctgaaatcttttctacagtgtaaaatttttagttattaaccgcggtcatagaatttttatctaagattacagtacaagataagaaaggaatcttaatattatatgaacaaatgagttaatagttatatacggagttatagaataaagagagaatgtagggtagtatacaataaacaaaataaaataaaataaataaaatgaaatgaaataagaattttcaacatctaaccagtagattaataacaagaaatgaaagtttatctatgaatgaatgtaatctatctctgaatggtataatattaaaattttaactgtgatttgatatatttaaatttgaaaataattccctctaaaccaacacatatgttcaattagaatgtcagcataatctaaatgatgtcattctagcaaaaaaaaatgaaaaaaaaaaagaaaaaatgtaaaaaaaaataaaaaaattggaaaaaatgtaaaccataaaagaaaaaaaacacaaccttgaagtaaaacttgaaaataaaataaagatgcccaccttgaataaaaaagtatatgaaataaaaaaaatgtaattgaatatgaatatgaaaataaatataattatgagaatgaataatttcagatataataatatatttaaaacaatcattaaaatgaatgaatttcttgtcatgtttgaatttgaattagaattaacactgaaatttgcaataaaaataaagatgaaatgttaatatgaaaataaatatgaatttaaagttgaataaaaagaaaatttaagcaattatgaagtgaagaaaagcataacagcaatcattaatggtcatgaataatattgagttaccgtccagttattttcttaaaaaagaaggttttggtaatgtaacagccttaggttcagcatggaatgaggaacctgcatatttgaaatcattagtagaacttgaactgtaagatgatgaactcataggttttgatcttgtagtagaagattcagaacttgaactagaacttgaacttctagataaaactggaggtctggtattaaaatcatggagttgaaccatctggtaatcttggtctattaaatgaaccagtatgaacagaatttgatttttgtaaaggttcggaagagactggagattctgaaatgattaaatttttcaaatcttgagttgaatctctaatttcatctgaaatacttttcaaagtagctctctttgttccaccaaaatcgacttccacacttcttggaggaatgacaattctattgttatctctcttattattattattattattattcttagccttgttgttcttactagtacaagtctttttggaagtactatctttgctattattgttattattattattagttttctttgaagcactgttattattattgttattattattgttaccctttttagagtttggattttgattttgattactctgttggggttgcttctttatattttgtaaaggctttggttgtctttgagtttttgtttgtttttttgaaggattagatttattattagatttagatgaatcaaaattctgtttattcattttagaagacatttgtccatgagacattggaatagcatgtatagattctgcaaccatcatcatagtaaatgtgatattagtcttgtaagatgtttagtagttattaaagtgtaaggtagtccttgcagaagaagagataagaagataagaagaataaaggaaagaagaagtggagataaagaaataggaaaagaaattgactcgtatataccttaatactaatactaataaaaaaaattggattttgccactatattgagaatctgtgatatcgagatcacaattcaatattagtttagacgcgacttcgtgtctgaaagttcgtcgtccattattaacatgaacgacatttgttatttgttatttgtatttacttatttataggttctattagatcttcctaatagaacaagaagaactttactttaactattaatttatattacataatagatccctattattattatattattatattaagcatatttgtatcggaacttagataaaagttagttacataatatttcttagaaatctgctcttggtcgtgggagagaaatttaagaagaaatcataaatcgcaaaagattatgatgacccattttctgtgattatgcgacactgtgtttgttgtatagtttgcttcttttcgtactattggttgtttattgtatgagtaatggaaggtattgttattttgatgcatgtagaattggctgtattgtctatggggtaagtttaacactgattactaagctttcctgtagtaaaatttatgaaattgtaaataatcttaaggaaggacaacaattttttaaaaaattttaacactaaaacaaccattacaaaactaaaaactcctttttttaacttttaaacactatagactgctatatatgtctcaaagattaaaccgattaatcactacaagttatccatacacaaatacacaacaaataacacaaatacaacaagcatcgatattcaacaaagagcctacagtaggatgagccacccctatcaaaataagatgaaaaaaaataacattacgtaataatattcatttgaaattttttttctttctacaatctctaagaaaaaaaaatttatcaaatttaatttgatttatttcagctgttaaactgccactttaaatagacgagcaatcaacaatggattcccaacaatctaataaatctcatagagggagttccaggaaaagtactgctaaacaaaagttacattctcaaggtaagaatgttaaagcttttgcttttgcaaaacctggtaaattacaacgtcaagcaacaagaagtagtgatttaggtgaaaaaagatttcatgttccaatggttgatcgtacacctgaggatgatcctcctcctgttcattgttgcagttgttggtcctccaggtactggtaaaactacccttattagatcattaattcgtcgtttaagtaaaacaactataagtgatattaaaggtccaattacagtcgttagtggtaaaagaagaagattaacatttattgaatgttcaaatgatcttaattcaatgattgatattgctaaaattgcagatttagtcttacttttaatggatggtaattttggttttgaaatggaaacaatggaatttttaaatattgctcaacatcatggtatgccacgagttttaggtattacaactcatttagatttatttaaaaaacctgcaactatgagagctgcaaagaaaaaattaaaacaaagattttggactgaagtttatcaaggtgcaaaattattttatttatcaggtgttataaatggtagatatccctgatagagaaattttaaatttatcaagatttatatcagttatgaaatttagacctttgaaatggagaaatgaacatccttatttattagccgatagattagttgatttaactcatccttctaaaattgaacaaaattcaaaatgtgatagaaaagttgctctttatggttatctacatggtactccattagcaaatgaaaatgcaagagttcatttagctggtgttggtgattttactgtttcttcagttgaaaaaatacctgatccttgtccaactccttattttgaacaaaaattagaggatttcgaaagagaacaaagaaaaattgctgaagcaaatggtgaagaaattcctgttaaaactcatagacgtagaaagagattagaagataaacaaaaaatcatttatgctccaatgtctgatgttcatggtgttttaattgataaagatgcagtttatgtcaatgttggtcaaaaagcttttaaatccgaagaagatatgggtggtattggtgaaaaattagttgctgatttacaaaatgctgctgatgtcttagattcaagaaaatcctctggtttgaaattattcagcgatggtcctgaaattaaagctgttaatggtcaatttaatcatgatgaagatgaagatgatgaagaagaagaaattgtcgctgaaggtgatgaagagtttgaaggtaatactggtagacatcaattaagaaatgcaagaatacataaacaagctatctctgaaatcaatgaagatgatggagatgatgaagatcttgaagaagatcattttgatgaagatgcagatgatagagcaagagaattaaaacttaaacaattaaagaaaacttccaaaacttcaacagaagaaaagttacaatttgaaactgatacagaattagaggatgaagatgattatgaagaaaactgataaaagttctaaatggcaacttatgggtggtaaattaaataatattcaagttaagaaaacttgggatataaataaattaatttacatgaataatatcgaaccaaaagatgttatatcaagatggagacaagaagatgatttagatgaagaaaatatggaaccatcagatgaagacgaagaagaagatttcttcaccaaaaaggaagagaaaactatccaagaagttaatgataaggctaaattatcattagaacaattgaaggaaaaatggtcatctgatagtaattcattattaaaattaaagaaaagatttttcctatctgctaaacaaagaattcaattagaaaaagatgcagcagcaggaaaaatcagtgaaaatggtgatgatgatgaagctttcggagattttgaagatctagaaaatgaagatggtgaagatggcgaaggaaatgatgaagatgctgatgatggagaggaatctgacaaggatgatttcactaattttgaagaagaagagatgaaggatgaaatgggaattggtaccgaagttgatggagattccgatgatgaagaagatactggtgatttaagtgttgataaacagagagctttaaatgcaaagaagaaggagaaattaaaacaacaatttgaagaagaagaagaatataagggagatgatgatccatttaatgaacatgataattggtatgaattccaaaaagcaaagatggcaaaacaattagaaattaataaagcagaattgagtaaacttgatgaagaagcacgtaaaaagattgaaggttatcaagctggtgcatatgttaaaataacatttgattcattaccaatggagtttgttgaaaattttgatccaacattcccaattattgttggtggtttattgagtactgaagaaagatttggttttatgaatggtagaattagaagacatagatggcataaaaagattcttaaatctaatgatccattaattttatcattaggttggagaagatttcaaacattaccaatttataccacatctgattcaagaacaagaaatagaatgcttaaatatacaccagaacattcatattgttttacaacattttatggtccgttagtcgcaccaaatactacattttgtggtattcaagttgttgataaagatcatacaactggatcttttagaattgcagctacaggtgttgttgaagatttaaatgctgaaagtacaattgtcaaaaaattaaaattagttggttatccagcaaaaattttccgtaatacagcatttattaaagatatgtttcacatcagctatggaagttgctaaatttgaaggtgcatcaattaagacagtttcaggtattagaggtgaaattaaacgtgcattatcaagtcctgaaggtcattttagagcaacatttgaagatagaattttaatgagtgatattatttcattaagaacatggtatcctgttaaaccaaagaaattttataatcctgttacatcattattattaaaggataaagataattggaaaggtatgagattaactggtgaagttagagcagttaatggagttgcaacaccaagtgagaaagattctaattataagaagattgaaagacaagaaagaaaattccatgatttgaaagttccaacatcaattaaaaagaatttaccatttaaatcacaaattcaagaattaaagaaacaaaagaagaagacctatgttcaaaagagagcagttgttatggatagtgaagaaaagaaggctagaaaattaattcaaactattcaaactattaagaatgataaggagagtatgagaagagctaagaaaacttcaaagatggaagaaaagattaaagctcgtgaaaaggttgaacaattcaaattggagagaacaaaggaaaagaagaaggaatattttgaaactcatggtaagaaacgtaagttacaatcaagtgaaggatcaagttcagcattcggtagtaaaagaagatagatggggtcttcaatatagctttattataaacttgtatgattaagtttctatttctataatattttatatagacaaaacattattattattactattaaaattatatttgcggaaatgtttagttataatataaaaatacataaaaaactatcaatctgtcatatatgaattgaattataggtaatgattagataaattgggataaccatttgaaaccttcagcataaccttgtctcataacaatagaacacatgaataattctaaaggtctaacaccagctgggacactaccaactctaccagtagtttgtaataaacctaaataatttctaacttcattttcactaacagctcttggagaatcgattttattacctaagataaggaaaggaacagattttaattcttgcatatttaataaagcatctaattctaattttgattcttcaaatctttcaggatctgcaacatcaactaaatatacgataccattaacttcagggaaataatctttccataatcttctagcttgttgatgaccacctaaatcaaaagttgtaaatctaacattaccaattgataattcttcagatgttggatgtaaagttggttgtaaagttgccattctatcatttttcaacatatgtaaaagggttgtcttacctgcattatctaatccaagaaataataatttagcatgtttattccataaacctaaatatgcaagagcgtcttgaaaccagtcaaaaatccacattttaatcagttacttataggatgattactagatatacaacttcaatataataaagcaatccccttccttatattttgccattcgaagaatcatgctctcactttaatgttcaaaatcacccattcaaaatttgaatattataataccaccacccgacccatcgaccgcatctttttcatttttttaaagtcgctcctctcgcccaaaggcgacatgtgtctttctttcaaattctttgtttgtttgaatcagtgttgctggtgaaggcactgtgtatatgctcagctttggatatctctgatatttctctgtttccgtggatctacatctcatttaatatcaccatatgaaacttaacatcaaggtatgtaccatatagattacattgtcacattttttcaatctttatgatcattgaaatactaacatttccatatttcctatttttttttgatttctattattatcacagcaagtattaacttccagatcagatcgtgtaaagggaattgatttccatccaactgaaccttgggttttaacaactttatatagtggtaaagttgaaatttggtcatatgattccaaaactttagttaaatcaatcgatgttacaaatgtacctgttagagcaggtaaatttattgctcgtaaaaattggattgttgtaggtgctgatgatttccaaattagaatttataattataatacaggtgaaaaagttgctcaatttgaagctcatcctgattatattagatcaattgcagttcatccttcaaaaccttatattttaacttcatctgatgattatacaattaaattatggaattgggaaaataattggaaattagaacaagtttttgaaggtcatcaacattatgttatgtcaatttcctttaatccaaaggatactaatacttttgcatctgcttgtttagataaaactgttaaaatttggtcattaggttcaagtgtacctaattttactttaaatgctcctgaatcaaaaggttttaattatgttgattattatcctcatggagataaaccttatttattaacttcatccgatgataaatcaattaaaatttgggattatcaaactaaatcttgtgttgcttcacttgatggtcatatatcaaatgtttcatttgctgttttccattcagaattacctttaattatttcaggttctgaagattcaactataaaaatttggaatagtaatacttataaattagagaaaactcttaattatagattagagaagagcttggtgtatctcaacaaagaaaaattcttcattagttgcaattggttttgatgcaggtaatgttattattcaattaggtgatgataaacctttattatcaatggatcaatcaggtaaaattatatattgtaaacataatgaagtttatcattcagttattaaaaattcagattctaaagctgaagatggtgaaattttaagtttatctaaaaaggaatttggttcagttgaagttttcccaaattctttaaatcattcaccaaatggtagatttgtttcagttacaggtgatgatgaatatattatctatacttcattagcttggagaaataaaatttatggtcaagcattagattttgtttggggccaagattcaaattattatgcaattagagaatcaaaatcaagtattaaaatctttaaaaattttaatgaaaaaccaaatggtcaaatcaatttaatttatgaagctgataaaatatttggtggttcattattagcagtcaaatcaaacgattcattatcattttacgattgggaatctggttcaattgttagaacaatttctgtcgatgtagaaaatgtttattggaatgatgatggtgatttagttttgatttcttcaaatgattcagtttatgcgttatcttttaatagagaaattttccaagatcatttatcaaatgattcaattgaccctgaagaaggtgttgaagaatcatttgatgttgcatatgaagttgatgatcaaattttaacaggtaaatggataggtaacgttttcatttatacatcaaattcaaatagattaaattatttagttggtggatcaatctataatttagcacattttgataaatcaatgtttttattaggttatttatcaagagataataaagtttatgtttcagataaagattttaatgtttcatcatattatttatcattatcagttttagaatatcaaacagttgtaatgagaggtgatttagaacttgcagattcaatattagaaaaaattgatgaaagagatataaataaaattgcaagatttttagaagaacaaggttatactgaaaaggcattagaaatttctaatgataatgatcaaaaatttgatttagcaattcaatcattacaattagaattagcattaaatatcgctaaaaaggataatagtcttcataaatggaaaaaattaggtgatacagcattaaataattggaaatttgatttagcaattgaatcatttgagaatagtaaagattatcaatcattattattattatatacatcatttaataatattgaaggattgaagaaattaagtcaatcatgtatagaaacaggtaaatataattcagcatttgctgcatcatgggctgcaaaggatttaaatacatgtattgaaattttaaagaaaacaaatagatttacagaagcatcatttttcagtttaatttataatagtgatattaagaaagttgatgaaattacaaaactttggaaggataatttaagtttagaagataacggcaaagttagtgatagaattttattaccaagtgtaaatcctgaatcattcccaacattaaaggaaattaatgaatcgcttattgatattgaaactacagaagaaatacctgaagaggagtccggtgatgttaaaatagacgatgaagaagaagaagaagaagaagaagaagaagaaaaaattgaggaagctgatgttgcaaatataatagagtctaatgaaacggccggtgaaggtaccaagtaatcgctggtagaaatggtcaacgaagttgatgacgataaatgataagagagttcaaaaaaaaaaaaaagaataaccctctaacgtttaaatttgtaacctttaacttaattatcatttaataactgttttataatattttaaatctacaatatcaccatatcggtatattttacagacattactattagttacgttataaaaaaaaaaagtttattcacataatatcgataatattctttcaaattgtaacgctatgcatgagaaaatccttattttttatcgcatcaccaataatttactaaccagtatggtggaaaattatcaactccgaaaccatgttggttacgaatttaaattaatttccccctattttattcattattttgacgtactacgttaattattattattttaactgtcaaacaattaaattatctaaattaccgtattattcatagaaatattttcaccctgcatctatcccttgaaataactataaaagatgtgactatcccatagttttgccacaatttctatttctaatttacttatcttatatttcttttgctttattttctttattcagacaaagacaaaacagttaactaattatcaaatatgcctgattggtcacaattcccagatccagataatgtttcattaactaatgaggatgtcccagattttttcaaaatctgtgttattcaaggtgtcgcagatgcaggtgcatcattcactggtggtacagctactagaattggttcaattttcgttatttttgttgtttcaacatttgttacagttttaccattattaacacaaagatttaattggaaactatcaaaatggttttatttatttgctaaattttttggtgcaggtgttattttagcaactgcttttgttcatttaatggatcctgcttatggtgaaattggtggtgatacttgtgttggtatgactggtaattgggcaagttactcatggattcctgcattgattttagcttcaatttccgttactttcttaactgaattattctcagaagtttgggttgaacgtaaatatggttatgttcctgaagaacctgatgttcaaaaacttttaactgaaaaaataaatgaaattaataacgataatgataatgctgaagaaaatgatggtgctgtttctgatttaaataaaaatgatgaatttgctgttgatcaaaaatctttaacttctgaactttctagatatgaatttaaaacacaattttctgctttccttatcttagaatttggtgttatcttccactctgttattattggtttaaatttaggttcaactgattatgatgaatttaaaactttatatattgtcttagttttccatcaatcatttgaaggtttaggtattggtgctagattatctgcaattccatggccaaaggataaacctgaatttttgaaatatttattatgttttgcttatggtattgtcactccaatctcaattgcaattggtattggtgtcagaactacttatgcatcaaattcttttactgctaatattgtctctggtgttttagattctttatcttcaggtattttaatttatacttcattagttgaatttattgcaagagattttatcttcaataaagaaatcaaaacaaaaacaactgatttaatgttcagtttagtcagtttattccttggtgctggtattatggcattagttggtaaatgggcataattttgcttacaatatttttattttatctttttataatcaactctctactctttttacacgttttaactaaatttagttaattaattaatttgatttaatatttaatatttccctcattcattaaaatatctctattattttttatttttaaaaaaaagaaagaaattatatactgtttataatgaaaattttaaatatatatattttctaactaataattcgcaaataacctaactttatcaatttcataatctcttttatgtaaagcaacaaaataacattcccttgattctaatctacatgcctttggtttaaatctatgaacttttttaaaaacttttaataatcgtttctctaataatttatcttcttcaccagtgaaaaatttaacaacaaatgaaccattctttttaagtaaatcaattgcagtaattaaagcagcatcacaaagatccattgacattgtatgatctttaaatgctaaacctgttgtgtttgccatcctaaaatatggattgttagtagtcttacttcgaaatgcgatagctggttgaataaatggtacatacatgtcacttaacacaacatcgacagggtatttattttctattttatcattatcattaatatcattaggattttcattttcattatcattatcaatatttccattaatatttaattttttagttaacaaactaagttccgcctctttttcaataattgaaacatctgaattaattaaagttttatcacttgtatcattatttgaaactatttcaacatcatcaaatattttattctttttttcaagagctgataatttaaagaaatttttaatttgtaaatgagtacctttacttaaaatattaccttgtaaggcagaagcaccatttggtggttgataaggtaatatatcaacacctaaaattttagaattttttgaacatctctctaatgcaacttgattccaagcaccaggagcagcacctaaatctaaaacatttaatgatttaccattacttgaagatttattgaaaatatgaaatttttcatcaatttgtaataatttaaaagcagctcttgattttaaattttcagcctttgctctacgagtataaaaatcactattttgtctattaagccaacgatttgatgatgatgaatttgataatagtgaaattgatgttgaaaaatttctaatattcattaatatagatgatttaagtacattaatatgtcgactcattggtggtatataattgtattatgatgataaatttgaataagtactactgaagtgttatgttacgtgttattgggtataaattctatacttattgataataaaccagagattgtttacctgtaattttgatgtgttaagattgtctcatgtaatgaaaataaatgaataaaattggtaccaagcctccaaaccacgtgcaacaaaagaggtctaaaaaagtgagaaaaaccctcacacagagaagaagaatttttctccaattttcaaattttattttcttacagtgcgaatatctcttactatcttactattagagtgatagatagacagtatctgtacaggaaaacttttcaattaatttgttcatttttgtttgattttttacttctcttcttttagtatcgtcgaaaaaacctttaccggattacctattctattctagggagactatcatatattaattaatcatgtctaagattaacactactcaagttagagaaaacgtccaaaatttattaaaatactccaacgaaactaagaagagaaacttcttagaaactgttgaattacaagttggtttaaagaactatgatcctcaaagagataagcgtttctctggtactttaagattaccaaatgttccaagaccaaacatgaccatctgtatttttggtgatgcttttgatgttgatagagcaaagggtttaggttgtgatgctatgtcagttgatgatttaaagaaattaaacaagaacaagaaattaattaaaaaattagcaaagaaatataacgctttcattgcttctgaaactttaattaaacaagttccaagattattaggtcctcaattatctaaagctggtaagttcccaactccagtttctcactctgatgatttatacgcaaaggttactgatcaaagatctaccattaaattccaattaaagaaggtcttatgtttagcagttgctgttggtcacgttgaaatggaagaagatgttttagtttcccaaattatgatgtcaattaacttcttagtttctttattaaagaagaactggcaaaacgttggttccttagttattaaatcttctatgggtccagctttcagattatactaaacgccttgacagtttcattcattacatttttataagttatatcaaatttatataagtaatttaagtttcagtgtttattataaaaacatatccgtattgtaaaaaaaataaagggttcttataaaattatttttattttcatgaaagtttacaatttcccttatttactatcacaatttcatcctgtaagcaatgagatattatggaatataatactattaacttagactctgatgatgaacccacaattcataaacacaacttctaaggaacctcaaagagtatctgaaacaattgaaatattgtctgataatacaacagatttaagtgatgtagatgatgaagtatttaatgttcaaatacccaataaaactataaaaccagtattaaataatgatacaaatactacccaaatcaaagtagataatacaattgatgaacctaaattaacaccacaacaattaatgcgcaggaaactggcagaagcagcagaaagaagattgaaacctacttctaacgatcatcaaccaactcatgaagtaaaggatgaaccggctaaacaagaaaaacgtaaagagtacaatttattagaagatggagacgaagatgaagacgaagatgatatggtattgctgaacgatacaatgccaaatactaaaagagttcaagtaaaacctataaaacgagttgaatcattcacaattgatgatgatgatgatgatggagatgatatcaattgggaagataatccaataattcaaccacccccaaataaaaacacatacatgccaaataaaagcacacaaagcacacaaacacataacaaaaataacttactcaatacaagtaaagctgacaacacttcaagaatacgaatgattgcaaatcctacatactgtaaggaatttaaagttaatggagatgttgatgcagtttcattaaatgatttagtgggttcaaaaggattaattaaaacatatcaatttaatatgttaattgattttgattatcttgcaagttttgttaataataaaaattgtgaatatgttttgatttgcaaaaatgatggagatcatttacatattcaaccttcatcatataataattataatgttaaagttattgatgttactgaaaatttacctaaatttggaactcatcataccaaaatgatggttaatttttatgatgataaaacatgtcaaattgttgttcatacaatgaatatgacacaagctgatcatttaattcaaactcaaatgtgttgggtatcacctgctttgaaaatgcatactgatcgaaaaaaatatttagatttcaatactagcaatatatcaataaagaaagatacaggtacagtttttaaaagagatttcattgcatatttattaacttataaaaaagaaggtgttaatgatctaattaatgaaattggtaaatatgattttacaccaattgatgttgtatttgtagcgtcatcaccaggtaattatcattatgaaaattgggaaacattaacaagagttaatgcaaagccaatgtttggatatggtagattatggcaagtaattcatacattaggattacaatgtttacatgggaaatttattggacaagcatcaacaattgcaggaccatgtgatagttggaaacgtaatttatttgtttatttattaacatcatgtgttgaaaaaggtttcccactaattaaaaaggctgattattcatttgaaccatatatgagaacaatgaataaagttgaaccaatacttatatggccaacaattgatgaagttttaaaatctagatcaagtatgtattcaggaattgcattacatctgaaaacagttgataaatgggaagcatatgagagacaatatcttgactataaggaaatatttacataaatggacaactaatagtgatactccatataagagtaaagcaggtagatcgaatttatcatcacatactaaaacatatacagttacagaagataattttaaaacacttaaatggtttttattaacatctgccaatatatcacatcaagcatgggggaaatttaagaaatataatttaattgattatgatatatcatcatttgaggcaggtatttttgttgcacctgaacttttgaatgtaccaagtaatgttaataatcacagacaaattttagtaccaacttatggtaaggatgatgcaaatgatgttaattttttaagtaatgattataaatttaaaattggtttaagattaccatatgatacaccattagttaaatattctgcaaatgaaaatccatgggcacaaccagaaacttctaaatatatacagtaagtactttattttactaattagttattttatttataaaatctagaacgtaaatatacaaaatgatggatagacataagaacattatctcattgcttgtgttttaacagtagttgtaccagcactgaaacatgaattacaacaaaccatacagagaccacagaaaagagtgtttatagctggcagatctaagacatcatacatgttatttgaacagaaatattcatgacattcacttttatctctttgactttgagttgcacgattggcctgtgcagctttaatcttttcttctcttgtaacatatgctttcggtggctccttatcctttggttgttcagtttttatatcttccgtaatagtaacttctttcttatcatcactatcaccatcaccactctctagtttaacttcttctaattcaggagttgcttgcttagatttagttggaatgttttttatatttgaagtagaagtttttaattcttttgcatcagtatatacggaacctccagcattagtaaattctgatctagcatcttgaaattgtgaggaacctgttgtgctgaaagatgaaattgaatttgatcttgctactgacattgtattaaagcggtaaataaagactatattatgaaaaacgaatgtgataagtaaaagatgtgataactggtagttaaaactgataacgatgttcaaactgaaccagcagttgttactttcaaagtaaatccaaaggaaaaaaatagaaactgttgataacactagtaattcaataataaagaatcatgtcagaaattttgacgcaatgaaaacgtaattttactatgatgactacttatccctacttattacttagattattaatagagtgttttatatacagtgtttgttcttcaattgttgtaagtatatctgcatgtacacgataatgtagtatctctgagtataacacactctattatagaagtaacccccccccccctataaccttattatatacactttccatagtgtgacaaatccccatgtaaattatccaaggctgtgtatggtatatttcaacatgaaaaattttttatctgcaaaaagtttctttactaatctagaataggtatgttcttcctgtataatactcaataaatcaagtaaactatgcctcctaaagttgaaactagaaaatggaaacctcctaagggtccaaagaatacccctcataaaaataaaaataccattggtttaggtagaactattaaaaatgcaaagcaaagtcaaaatcaagtttattatttacctgatggtcaaatgagatttacaactgaaaaacatgaagctgattgggttaaattaagatctgtcactcaagaaaatgcattggatgaattcttaaatactgctcaattagctgatactgattttacagctgaaaaacattcaagtgttaaaattattagaattaataatcaagctgttgatacaggtaattataatccttatttattaacttcagatgaagaagctaaaaaatttaaacttcaaaaggaacatattaaagatttaattgttccaagaagaccaaaatgggatgaaaatacaactaaatatgaattagagagattggagagtgatgcattcttagattggagaaaaaaattagcaatcttacaagaagatcatgatttattattaactccttttgaaagaaatattatggtttggaaacaattatggagagttgttgaaagatcagatttaattgttcaaattgtcgatgctagaaatccgcttttatttagatcaacagatttagaaaaatatgttaaagaattaaatcctttaaagagaaacttattattaggttaataaagcagatttattaacttatcaacaaagattagcttgggctgtttattttaaggaacatggtattaaatatactttcttcagtgctgctaaggcaaatgaaattttagaaaaacaaaaggaagaagaagaagaacttaaaagatcatgctgatgaacataatggtgaattaccaccagtatataatcctaatggaaatcaaaatcaaaatgaggacgatgaagattatagtgatgatgaagatctagatgttgatatatccaatttaacagaggagcaaaagaaagagtatatgaaacttcaaaaggaacttgaagaattagaaggccaaatggatgatttagatatcgaggatgaacttgatgatgaacttgatgatgaagatgatctagcaagattagaacgtgaattaaaagaagaattagaagaagaatttgatgatgatgaagattatttcgatgatgaagaagattatgaaggattagatgatgatattagagaaatgacacgtattattacagttgaagagttagaagatttattcttaagagttgcaccagaaccattaactgaagcaccaccaggacaaccaagtagaattcaaatcggtttagttggttatccaaatgttggtaaatcttcaacaattaatgcattagttggttctaagaaagtttcagtttcttcaacacctggtaaaacaaaacattttcaaactattttgttatctgataaagttatattatgtgattgtcccggtttagttttcccaaattttgcatatacaaatggtgaattagtttgtaatggtgttttaccaattgatcaattaagagaatatactggaccttgtcaattagtttgtcaaagaatacctaaatatttcattgaagcagtttatggtattacaatacctgttttatctaaaactgaaggtggtacaggtattccaactccacaagaattattaacagcatatgcaagagcaagaggttatatgacccaaggttttggttcagcggacgaaagtagagctgcaagatatgttttaaaagatttagttaatggtaaattattatatgttgaaccaccacctcatgaagatggttcaaaggcatctgatgatgaatgtttgaaatttaatcatgaattatatacaatttcacatttaccagaacaaagaaggatacaattaatcagagcaattaaggctaaaaatttatcagttaaagaatttgatttatcaaaagatttagataaattaacattctcaaggacatttatcaactgatgacgaaaatagtaaacatcgttcaagaacttatggtggtaaacaagctgcattatatagtgctgcaaatgaattagatgatgaatttttcaatatgactcaagttagaggtaaccttcgtggaccattttatcaacaaaaagttaatggtggttcaggtaagaagcataataaagcatataaaactaagggtaagagaaagtaggggctcataactatacaatctatattctgtatcataacgtataacataacaacatttcatatataaataaattacaatttttttgctaaatagtaaatgtttcatcacctaattctaaattaagttgattaatctctttttcaatatcttcaagattaatatctaacgtttttaaatcatcaaatcttctttgctttttgaaagtttcatacatttcagtaactaagaatttttgttcatttaaaactatcaatttatctctcttttcacgtatttcacgtttcgataattttggtctatcatttataatattttgtaatttttgtctttccttctctaatttaacattttgtgattttcttaatataggcaaattgattttaataaattttataatgacattctttaaattagtcaaaattctaatttcatcatttttacaattacctttattaataaataaatcaatatctttaattaatttatccaacttattaaaataactaacatatagtttattttctaaatcatccttgataaatgataaatcctctgactctaattttttagaaattaatttccaaatattgaaaaacttaaccatttcatcgtcaaattgttgtttatctaacaggaaaactttcttattcaaaacacgtcttttacattctttacaaatccttaaaccaaatttatccttttttaaaagatttcgtattctatccctttcttgaattgatatatctttatcaactataagtaattcaaataacatacctaatggaacaatcattgaacaacctttttgtaaatctccacaaactgactcaccacaaattctacaatgatgtctcctatttaaccaagtgaaagtatttaaacaacattgacaattcccctgattattccaattaaccaatgatttttcaaaattaataaatgattcttcatttataacattatttaacatccaattaaatactttatctaatcttctatcaagtaataaatttttcaatgattcatcaattaatcttttatttcttaattctttaaattcatcagttaaattattaattggtgatataatatttggtgatttattaatacaatcaatacaacaatcacaccaaataccatttttatcaaattctaataaactattaactttaccacgattaatatgatttgaacaaaatgttaatccacatatacaacaattagtaattgaactattattacatttatgacatttatttgatttaatataatgatttctaggtattgattgtccttgatttaaatgttgtgaatctatatgattatttaattttatcaatgatgacattggtatattacaaattggacattgaattgattgtggtggcggtgagggtattgttgaagatggtgtagataccgaaggtgatggagtatcgggaactggttttgacttccctaatatacgtggtttcatttatctaattgattgatatatataaagatgcattaaaagaagatcgtacgtatctgtttaataatatgattaaagaaaaaaatatattttacaaaataataatataattagttagttaattaaaaatagtcaagttaatgattttgaggatttaataattcctctatcgtgtaataagaatcatatgataatgatttccaagagggtacaagtttatcaattaaagttggatcaacacttaattcacgttttgtaaaatttgttagttcaggtacattaaatgattcaattaaattataatttctaaaatttggtaatttaccattttggaaattttcatttcttaattcattaaaataatccattgacattgcatcaattgcacttattctctttattggagaatattgaaaaatatttataaataattgttgcatttcaattgaaatatttgggaaaattttcattattggaattgatttaattgaaggaaatttatgatctttataatttggattcatatcattaatttgatcttttgaaggtgtacctaataattttatgatttcaaccaattgatcaatacctgattgaccagggaataaaggttgacctaaaaccatttcagctattacacaaccagctgaccaaatatcaatttttgttgtataatttctagcaccaaatattaattctggagctctataatatcttgaacatatatatgaaacatttggttctgttggttttaagattttagcactaccaaaatcacataattttaaaatacctcttattggatcaattaataaattttgtggtttaatatccctatgacaaatacctaatgaatgaatataatttagagatcgaaataattgataagaatataatttaattgctaaatcaggcatatgaattttacgagagaaataccaatgagttgaagtatataaagtttcaggaacatattctaaaattaaattaagatataattcatccttttcatttgatttataaaaataagctaataaattaacaatattttgatgattaattattttcattgtctctaattctctatttttgaatcttttatcttgtaaaactgatttaattgctgccttttcattatttggtaataaattaattaaataaacaaatccaaatgaaccatgacctaccatactttgttgagtaaatgataaatttttttcctcatttgattttatatcaaatacaaattctgtacgtgttagtggagagttaggtgatgtgttattagacgatccaattgatcctgttgacattgtgttgtgttgtattgtatattgaatactttactatacttccccctaaagaaatgacatgacactttgatatatatgactgtgtactaagagatatttctcctattatcaaataatttgaaatcgcggagtgatgcactacgttttattattattattaggattaagattactattatgactatgattataattataattataataaataaataactttagataataataatattattaaatatattggatgaatatgaatagaattaattatatttagaaattaactggtttatcaaagactgccattgcagcttccttgaaagcttcagataaggttggatgtgcatgacaagttctgtaaatatcttcacatgatgcaccatattcaattgctaaacctgcttctgcaatcatttcaccagcatttggaccaattatatgaacacctaaaactctttgagtttctgcatctgcaataaatttaacaaaaccttcagtatccatattagtctttgctctagaatttgcaataaatgggaatttaccagttttatatttaataccagcttcctttaattcttcttcatttttaccaacccatgcaacttcaggatgtgaatacataacagctggaatatttgcataattaacatgaccatgtccagttttaatatattcaactgctgcaataccttcttcttcagctttatgagctaacattggaccaaatgtaacatcaccaatacattgaatatgagaaaatttagttttatattcactatcaatgacaactctatttctcttatcaaaatctaaaccaattttttcagcattaagatttgatgaatatggtcttctaccaactgcaactaaaagtacatcagcttgaattttttcaattttaccagatttagtatcttcaaattcaatatcaacttcaccattagaatttttaacagctgagacaactttagcacctaattgaaatttaagaccttgctttgataagaatttttgagttgcctttgaaacttctgcatccatacctgcaccaccaattgccttttgaaattctaagacagtaacttcagaacctaatcttgaccaaactgaacccatttctaaaccaataataccaccaccaataattgctaatctttttggaatttcctttaatgaaagagcaccagttgaatcaacaattttttcttgatcaatttcaatacctgggaatggtgaaggttcagaacctgttgcaataataatattattagcagttaaaattgaatcctctgaaccatcaattggatcaactttaacttgatgttcatcaacaaatgaaccattacctttataataagtaacaccattttttttaaataacatttcaataccaccagttaattgtttaacagcagtttcctttgccttcattaaattacctaaatttggtttaacatcaccagagatatcaatacctctctttgaagcttcatgtttaacttgatggaaaagatgagaattatttaataaagcttttgaaggaatacaaccaacattaagacaagtaccacctaatgcacctctcttttcaatacaagcggtattaaaacctaattgagcagctttaattgcagcgacataaccacctggaccaccaccaatgacaacaacgtcatgtttagcagtttttgtagcattacgagcagtagtagagaatgatctaagcatgttttcctttaccaattagaacccaattctaaatcacaagagaaataacttaacattataacagactcttcagtaaaatatttttaattaattgactacataccccactatacaagtaaatatttcggacgcgaactcggatcttagaagtccttcatgttcaaccactgctgcactctctctgtgaactcttgtggtttctctcccataacccaatggccacattggatgtcctccatagtgaaggatgggaagtatttaccaatagtaggaatcatttcatcacttatatacggactctctgtacctctaataaataatgtaggtccattatatctaacattctcatatggccattctccaactgcatcaataccccttcttaatatattaataggtaatctacatttataatatttatcactaccactactaccatcctctgattcatttggtttcatattagtaagtaaaaattgtctaactgccttatttttctcaaatttacttaaatattcatcacattcctttaatgatttgaattttttaccattcatttcattataaactcttaaatatgtaccaaagggagaatgtccaataggtctattactcggtgatgcatcaactgaaattaatcccttaactaaatctttcctctctaatgataatgccatacccgtacgtccacccatcgaatgtccaataattataactggttccttgatttcatcttctattaatttaccaacatccattgctaatgtatgataattgaaaggtgtcatagctggtgaatctccatgacatcttaaatcaactaaataactctctctatcctttgataaccatctactaactgtacgtgaattactcttattaccaaacagtccatgtaaaaacaccaatggagtcttactactactcttcactcccaacctatcaaatgctaaccgaactgacatcactggccttaaagataaaaggagtaagtacagaggcttaaaagtcgaaaggatccatcactatggaaaaatcaacatgaaacgcggtacgcgcttttcatacctgtcaaataactctatcttgcaactaatacgacctttatctgcctgctaccctttataaataccttcaagtccctgatgatgtattataatcactattacttcttctctcatttagtaaatgaatcctttattattttattacttatcattagctttagctgttccactcggtgaaaaaaatcatattcatcatcaacataaacgtgctcctaatgctgatccggtagcagatcctcaaccggtacctcaacctcaaccaattgctgctccttctcctgaaactgtatacgtaacaaatatagttatgatggatcaatttgatgatactgctacatcaactactgctctagattcaactccaacttcaacttcaacggacactccaaatttcagtattcaactggttaataaaaatttacaaagtgaagcatcacctaagttcaactgatagctcaccaactacaactcctgaatcaactactgaatcaactactgaaccagtaaatacatcagttacaacatcagaaatagcttcatcatcaacagctaattcagaaactgctcaatcaactgctcaatctaataatagtagtagtggttcatactccggtgctaaaggtattacttactcaccatattctaactcaggtcaatgtaaatcatcaagtgaaattgcttcagatatggaaaaattatcagaatttacacttattagagtctacgctcctgattgtaatgttatttcagcattacttgattcattatcttcaaatcaacaaatttttgcaggtttattctatcttgattcaattcaatcagatgctgaattattagcaactcaagttaaatcatcatcccgtggttgggatgcgatttatgctgtagctgttggtaatgaatgggttaattcgggtacttattctgctgatactgttgtaggtgcagtttctaagggtagatcaattttacaatctttaggttatactggtaaagttgtgacagttgatacagttcctgcatatcaaaataatccaactctttgtgatgcatcagattttgcagctgttaatcaacatgctttttggaatggtaatattgctccagaaaattcaggtaaatttattagtgattcaattgattcaatgtcaagtttatgtaataaagatgtacttatttgtgaaactggttggccaactcaaggtcaaacttttggtagtttaggtgttcctggtaaatctcaacaatcagaggcaattcaaagtattattagtgcagttggtgataaagttattctatttacaacttacaatgatctttggaaacaaccaggctcttatggtgttgaacaatactggggtttgttttaattaagataataatattttatcaataataataatatacaattctgttttatatacaaatatatacccttaaatatcgatatattaatttatttactcttctgttcttttatctccttttgttgtttaattttccatgctaaatattctacactatgtcctaatctaacattactatcatcatttaaaactctattttgaatatttaatggtggtcctctaaaccataaaattccattcttatcaattttacgaaatttttcacgtacttcctttggatcataaattccaatatcattttgctttttcttgattgatccataaatcctactgatattacttctatcaatatttttataacttctacgaattaatggatgaatagaagtttctcgcatattaaataaatcattgtattctctaacatatgtaaatgatgtacttggtgattgaaatttagaatatgtaaaacttgtattattatatggtgatttaattattttatgtgttgataaattattaattgatgatatgttattattattattataatgatgagtttgattaacaatattatgtgtattaataatagagttattattgataattgcattattaacattatatgatttgaatttgttatcattactatcatttaataatgataatttttgaacttgttcatattctggtgtatttgtattatgtgaatatgaatcactttgattatttaaattataattctcaattaatgcacttgatggtattctaatgttattagttggtggtacataacttttacattcattttgatttaatgaattatcaaaataatgttcatcaatttcatcatcaactcttggcacataaactgcaccaacaactggtggtgagttcatattaataattattggacttggaattggtgtactactcgttgatccaggtctcaataatcctttaattggtgatgggaattttctcaaaactctattactacttaatgttttaattggatcctctaaatgtctaacttcatcaggtaaacaagctttccaagttctgattttagcaaatgtattttctttatcattgtatctaaattcacaaatgaataatggtccatcaaatggtataccaggatctccctttaaccatcttgtaaaatatgcaacataacatggacctaaaatttcgttaactaaatgatctctatattgaccagttttaacaacttcattctctaaaaataatctatcgactctatgaacggtccattcaggtctgtaataccaacaaacattcatacataattcaccattttcttgttgccataatctaaaaatttgtgcaactgttggtctttgaggatcatttggattattaattaaaatccaattaccaactttataagttctaccattaaattgaacttgacttaatgggaatttatttgtttgttgacctgaaatatattcaacatcaggttttgacatctcaatttgatataatcttgaaatatttgtctctaaaacattcaaattatttttaataaattcattattaataaagtataatctattgttattaattaatttgaaaacatctgcaacatatgcgtcaacagttttataatatctttgtttaattaaacctttaatatctaacattgagattggatctttaacaattttcaagtaatcaggatgctcttgttgaccaggtaatttatcccaaaatgaaaccattgttttaccaccaactttaatcttctttaaacctctcataattgatttaattctcatttcatgaggtttatcaacaattggaggacgaccacgtttaacccattgatctaatacttgtctatttggtgtaaaattaagtacatttggaggtggatagaaaacatgatctttacccgtatcctcaattttagagacataagttgaaggattataattttggttaattgtaaatttatcttcattatcataagtttcttgatcattttcattttcataattatcatcatcatcaacatgttgttgtgagttagtggctgtagttgcattgttaacattagtgttcatattagtgtttgtattaataggaatagattgagtattgatattattattagtattattacccattgatatattatttggattaatggttgttatatcatttggattaatagttgacatttcatttggtaaagggacccaaattaggataaagtaaactataagtattaacaattttatgatcattctttatttttggtataactgtatccttaatataattatctaaaattgttgcaaatttataaaaatcagaagtttcttcattaaagaatcttgcattccaagtgatttgagctaaatcattgataaaagcttgacttgaagtatatttatgatgctttgatgccattttaatcttagaatatgacattggaactttaattactttataatattctaaatttgcacgtaatggtaatgcatggaaggcgtatgagaattcattaccattttcatcgaccaatttgtagatatcatcgagtataccaaagaatacatcgttcatataattcttatccctctcactaagtgacattgctgctgttatctaatttaaaatatacgaaaaagataaaaaaaactatgcaattataaacaacaagctcgttgttgacggcgttaattttttttgattttcaaagaggtcctcctatagattttcattacgtaagtttggacatctctctagctaatctcttaaggtaagacgaaatacatcagtatggacagtatggatagtatggacagtatagaggagtttcagaagttcttatatgacaagacattggatggacgaaggataaatgtgctggctttggtgggtgcagggctatctgctccttccggtgttataccctcaaatataggtgatactgatggtgataacgtttggaggaattattcatttattgatttagcaacattagatgcatttgattcaaatcctgcccttgtttggttatactatgctctcaaagcgacatcaagcattaaaggcagaacctaatgaaggtcataaggtattggctcaattaagtaatttgaatgataaatttaatttactaacaatatctcaaaatatggatggtttacatcatagaagtggtcataatagagagaaattattagaatttcatggttcattagtttaatgttaaatgtacaaattttatgtgttattatagtaaatatacattaaaagatcccttaactgattcattaggatgttactaaatatgaagattcagaaaatacccaattacctacaatcaattcattagatcaattaccattatgtcctgaatgtttatcaaatggtgaaaaatatttacttaggccaggagttatttggtttggtgaatcattaccattatatctaattgatcaagcagatgaatttataattgaaaatgatattgatttagttattagttattggtacttcgcatacggtttggccaacatcatcatatattgatgttattaaaaataatggtggtgatattgctgtttttaatatagtggaagattcagagattgataaaattaaagaaacttcaaatacaaaagtttggaattttattggtgattgttcaattacattaccaaaagtgtttaattcttttataaattcttaataaatatacatataacttatttgtctaattatttaacctaaatatttccatattaaatacataatgaataatgttaatgaactgaaaacatagaatataatcttatcctcccataaaactttctcaattttaccaacagtttgatgacttacacctaatgtttctaatccttgactcattttatcacgtactttaaataatgtctcattttgttcaacaatatcatcaaatgcggctctacccatctctaaaatttcatcaagtctagcattacctctctgtaatttattctcttgatccatcattgaattaattgaatcatcattattattatataaaattatcattgaatcctttagtttctattatttaatccattatatgggttatcatcaattccacttgctgttgattgttcaaataatccattcctctcattatttaaattcatttgtttaaattcatttattttatcctctcttttcttctttaattgttgaaattcagttcttaattgcttcatattcattgaaaagtctttcatatcttaatctattcttctctttagcattaggttcagtttgattgtttatatatttgtcaaaatcattcaataatctattaattgaggttaatgttgtggaaattgtaccaattaatgataatgtcataccattcgatatattaccttcatcattcaaattactacttaaagtagatatatccttactcacttgattgacatgtttagtagtttgtttatataataaactcattgtcttatactacaccagcgtgccgaatagatctataaagatgaagctattcattgaatggctatactattattacgtaaaataaatttccatttcaaacaacatgttaataaacaacaatacttaacacttgatcaatcatacttctttcaataattaaactattatacaatacattatatctactataataatatctaatatactactattcattttctaaattagctaaaccatttaaaccgaataagaaacctaattcttttctacttaatttacctgcatttctacgtgcatttggatcaagtgcagaaccaaccatttcctctttttccctctgtaattccataattctatcctcaactgtaccttcaattaataatctatgaacgaaaacttccttcgtttgagaaattctatgaactctatcttgagcttgcttttcaacgaatggattccaaaatggttcagaaataataacatgatttgcacatgttaatgttaatccaacattacctgcctttaatgataaaagtaaaattcttttcattcggatctttataaaatgaattaatacaatcatttttagcattaatatccattgatccatcatattgtaaaaattcaaaattattttcacttaataagattttcaataaatcaaaatatccaataaacttgagagaaaacaataattttttcagtacttgactttttgaataattctttaataatatcaattgttttattcatcttggcagttattaataaattaccaccatcttctgcaataaatttttgtaaagttttcattctccaatttttatcacttgccttagaatctaaatcaaattttttcctaatttcttgccatgttaaaccttcaacaaatgaattaaataattgtaaatcaactgattttgtagatgaattataaattccagcaaatattacatttcgctgataaatcatcaccttactttactttcacaattatcttcaaaaaattcatcatgacaatcataacaaattgtatgaccacatttactcattaatagagtttggattagttgttaaatcttgattacataccatacaattaaaactttcttcattttcaactttagcaattaaacctttataaacattttcactatattctttaattgattcaaaaccatttttaaatctatccagttttaaaactctatcaccatcatcacctaatctaactaaatattgatgatcacatgattgtctcattctaagtaacattgttaaaattgatgaataatttgtatttcttgaatttaataaattatttgcagttttagcagatttattctctaattgatcataaaattctttctcaattgtacccatttgaactttaacttcagtaacatgtttttcaggtaatgataaaattggtttaccatcaatttcatcatcctttgtacgtcttaataaaattgcacttaataatgcatgaattttctttgtactaccacctccaccatatttattattaaatgatgaaacaatactagtattaaatttattccaatcattataaggtttaatatctaagaatctaattaatggatataattcttcaattttattttgaattggagtacctgataaacaccatctataagttgaagttaaaaatgaaactgctttagatgcaattgttgctctatttttaataaattgagcttcatctaatataattctatggaaaattgcattatttgtataaaatggtgaatttttcatacctttgatttttttctttaaagaattttgttgaatatctaattctgtaccataatgttttttccattcagatcctaaagtttgataactaattaaaacaacatcaaattgtgataattcattaaaagatttaactttattacttgaatgataaaggaaagttgttagtttataatcactttgtaatttcatattaatttcttgttgccattgttgtaataatgaaactggaccaacaattaatgttgttttcaatgtatcatcctttgatttatttgaaacaattaatgaaattgcttgaactgttttacctaatcccatatcatcagctaatataccacctttatttggagaattttcaattttcagcatccaagataatccaattctttgatgttttaataaagtaattgctaaatcttttggagtattggctaaaccttcttcttcaatttcacttgccttaatagattccattaaatttttaataccttcttcatcattttgtgcattattaccaccattactataaatatttgaaaatggtaataaatcatcagtatcatctctcatattattatctaaaatttcaaatatttgattagatgagaaaggatttgaaggtatttgataattattattatttatcattgggatattattattgttgttaagattatttgccataggattatttggtaagggtattttaggtaaagcaggtggagaaagtgagaattcacgtaaagttttagttggatctgaattataattttgaaattgatacattgttctaattgtattattcattagggtaacttctggtaataatttcataaagattttatttgaaggtattgttaatgaagctaaacttgaaccatttctaatactattaatacattgaattcttaaattttctaattttttagaattttcaattgttttcaatttataacttttcaaacgatcaattaataaaccaacttcaccgaaaaatcttgaaagttgtgttaatcttgaattaataaaacgtaaaatttgattataacgtaaatctgcctttttattaccattatattgtttagctttagcagttatttgatttttcaaattagttacatttttcaaaaaaatatcaattcttgaatataaatcattaaatttcataattctaaaattaagtgaatgaattgtaaataatacatcatctctaaaattcataacacataaaggtggaggtaaatttgatgaaatatctaattgaatttcattccatgatatagtatttggtaatatggggaaaggttcagattttaaattattatttataattgaaggaaatggtatttgatatttttcaggtaattgtttaattggaggataattttttaataaattattaatccttaattgattttgatgattaatttcatctaattcacgttttaacagtgattgttgaaattcattctctcttttaatattttgttcaactaatgattgtttatttgcaagtatttgttgtctctttaaatcatcaatacgcgtagatgatgatatatcatcattcatttcgcgtttaaaattattattttgcgtattaaaagttgaaggtagagaatttgacgataaattagtgaatgaattatcagttgatattgaaggaggtttagaaggtgcaatacctgttataattatatcatcatcatcatctgaatcattatcattatcatcatctgaaccatatttaaaagctaaattaggacgtttattaatattttttattggtattggaggctcagttgatatagttatattattattattcacattattcacattattcacattattcacattattattattatttatacttgcaggttcagatattttcttcttattgaacaacgtactatctaattttaaatctttagccatatcaaaatcatcgtcatcatcttcttcatcagatgttaatgatatataccctggtaaaggtgttaatttattgatactagtattattgttactactaatactattattattactaggataaagactagcagtatccatatttaaacgtcgtatatttgccattacctttttaaaaagaaatgcaaattcttatataaaacactacacaattataaatcgccattctctaattgcaaaagtactgttgctcgcgcaaaggctcctcttaatagagggtgatcacccttaattgagatacctctctggaacgacgcgacggcctctctgattaaaccacaatgtaattgagctgtaccatgtctaagatgattatcaggtattgttgcaccgagtaatattaaaacttctgaatcttgtaatgccatttgataatttttcattgccattgatgcatcacatctacccattaaacaaactaagaattcaggtaatgaaccttgaaatggttcaaatgatgatcttgattttgctaattctaaacctcttgtaaatgcagtgaaagcttcattaaatctattttgacgtaataatccttgacctgtttcatgtaattttttaatttcaagtgataattcttttgtaaaacttgtaggtgatggaggatggtggtatatcagaatttaatgaaataaatgatgaataaagggaatttaattgtgtaatttcagtttctaattgagtattatcggttgatatacttttagatgtagtattgtatgttattggtaatatagtcattgttttaataagaaaagaaagggatgtcttataggaattatatacttattgagaaaatcaaattataaatccatgatactgaaaaattaaaattaaaacacgtattatctaatctttatacttcatcttcactatactaaacatatgggtaaatattattgtcattactgtcaaacacatttaacacatgattcgccatcagttaggaaaagtcatttaaagggtagaacgcattgtcaattagttgaagaatattacaggaatgttataatagagaagaaagatactattatcaatactaatagtactaatagtactaatccattaaacagtttactatttaagggaataccaggtagtagtagtaatagcagtaataataataatactacacatccactaatactaccatacccaccaacagacaactcactgccatatccaccacccactgtataatagtaatactaaataacaccaaatttccgagcacagggtaaatttccgagtatactactaataataataataatgatccgtcatagtaataagataattttccactgagtggcgaaaaagtttttttcttcttctcataataatagtgttattttagcatatttgctttcatcacttataatacactcccctttctctttttaaattttatattttatattcccctctgtaaacaaattaatattcaaacaatggcacaacaagttccaacttttaaattagttttagtaggtgatggtggtactggtaaaactacttttgttaaaagacatttaactggtgaatttgaaaaaaaatatatggcaacttcaggtgttgaagttcatccaatgtcattcttcactaattttggtgaaattaaattcgatgtttgggatactgcaggtcaagaaaaattcggtggtttaagagatggttattatattaatggtcaatgtggtattattatgtttgatgttacttctagaattacttataaaaatgttccaaattggtatagagatttagttagagtttgtgaaaatatcccaattgtactttgtggtaataaagtcgatgttaaggaaagaaaagttaaggcaaagacaattactttccatagaaagaaaaatttacaatattttgatatttctgcaaaatcaaattataatttcgaaaaacctttcttatggttagctagaaaattagttggtaataatcaattagaatttgttgaatctcctgctcttgctccacctgaagttactgtcgattcagacttaatggctaaataccaagctgaaatggatcaagctgctgcaatgcctttacctgatgaagatgatgctgatttataagttcttattatgtaatcaataatttctcactatataaaaaaaaactaaaacttttttcaaccaattaaatctcacctccttttctcgcccttttttttcgcctactctccataatacttccatttgtttagtgtatagtacaggtacactaacatcttttgaatattgatttaaacaagctaaaaatgttcagacaatctttaagacaattctcaacaactttaacccgttcaaacattattgcagatctttatgttaaagaattaaaagcttttaaaccaactcctttaacaaatgctgatgctgaatctgcaacaaaggcatggaaattaccaagtgctgctaaaattcctgcaattgaaggtgaaggtgctgatgctttagctgcttatgaatctgctcctgttgatgttactacctcatctgctgatggtaatgttgttgcagaagaatataaacctgatgattggttcgttttcccagttgatgaagaaccaggtcatcatgctcattaatttatgttattatcattatcattattatatattaataatattcaattagagagtataatatagtatggtatactttacaattatatttatattatttatttatatgaatttatatttatttatttattacgaaaaaaaaaatatatcaatttaattcaactgttttaggtttatcatcatcatcattatcaccaccattatcaccaccattatcacccttgttacctacttcctcattatcatcattatcattatcatcattatcatcattattatcaatattactatcaattctaattagatcaccttcaatttcattaaatgtaattatactattaccagttaacatatcttgtaatttcttatcttcttcactatcattctcaattgggaatggattattagaactatatcgtttaccattcttttcaatttttaaacttttactacgttttggaatatcaattaaactaactttaggaaatttattattaatattttcaacttcatctttaatatcattattattaatttcactactttcttgaataattttctcaatttcttcctttggttcaattaaaattttaggtaattcattattactttcattatgaattgaaaatggatcttccttttcaagttcacttatttcattttccttaatttcactagttttatcaattgttaaacttgaatgacttttagatccggtatttgaattagtattaatatgactactactactattcatattagtagaattcatattcatattcatactattattaagattaggattagaattagaatttgtacgtgtagaattcatattcattgtattattcatactcatactattattcatcatttccattggatcctttggtaatcctttgaatggtgaaaacattggtataatacttggattaaatggttcaattgcaggataaatttgttcattatttggatatttatattcacctaatccataaaaatcattataaccatcatttataattaatttattaatttcttcattatttaaattttttaatttacaaatttcaattaaaacttgataaatatttggtctaaaaattggattctcttgtaacattatattaattaatttttttaaattattattaattattggtttaattgggaatgaatatgctgaatgtaaaatacctaattctcctggtatttcaaatggtgttgtataataacataatttataaagaaatacaccaaatgcccaaatatctgatttttcatcaattggtaaacctctatataaatcaatcatttcaggtgatctatattgaggagttgtttgcattaaaatatcattatgtaaaatttgaaattcttgatgattttttggtacccttaaaattggacatgttgaaccaaaatctgctaatttaaattcaaaattttcattaattaaaacattctcaattttaatatccctatgaattaatttaattttatgcatattaaaaattgctttacttatatcaaacataattttcaaaatttcttcataatttaattttgtacgtaattttaaattcatataatctaataatgatttgtttgaacataattccattaaaactaatacttcatatttacctgatgatccatttaatctacttgcatttgaatcataatatttaacaatattatcagatttacttaatctttgcataacttcaacttctgctcttaattgatttaatccttccttatttggtacaataaccctttttaaacatgcaatttcactattttgttcacttggattaattttaacaatataaatatgtgcaaatcctccttcacctaaaaatttcataattgtaacttgatgtttaccaacaattaattgtgtacctggtaacagtttctccaacattgcaggtctaacattcataccttgttgtggaacttgttgtggaacctgttggggtacttgttgtggaacctgttggggtacttgttgtggaacctgttggggtacttgtgggggtacttgttgtggaagttgttgaggtgcttgttgaggaacttgttgttgtggtatttgaggtacttgaggtggaatttgtggaatttgtggaatttgtggaatttgtggtacttgcggaacttgtggaacttgtgaattattataatgaccattaggtgaacgaatatttggtattgaattttgttgttgaatatatgatgaatttgaagaaattgatgtattatgatttaaattaccattcatctgtgattgactaattcttttaggtggtggtattggaggaatattttcaaatgttggattatgattaatattattatgattaaaattaatgttactattattaatagaatttggagtattagttgaatgtatctttgcaatatctggcattacaatattattattatttaattgaattgggtttaatattggtgatgttgaactcttatttgattttagtgatgaacttgtattaaaattaaattgtggttgtgatactgatggtttattaggaattattggttgttctaaattaattgaattaaatgatttattagatttattcatgttaccatgattatatatcaaattaggtgaattctgttccattgtttaagttcaattgatttcaattgatttaaaataaactatgtattaaatcagaaaatcctaagagagacttaataacacatgtgataggtataggtagactaaatttataactcaataactgcctaatagactgtttaaaaaatgaaagggttgtgtgatttgtcaaacagtcgcgactaagccaggtttgaacttttacacgtgataagaatattttaaaaaaatttaggaaggagtaactttaagtactggttttatgatgaaaacaaagtaaattcgtatcaataagttaaatttacagaaagtagaaagttataaaaactatgtatagtaataaaaaaagcacacgatattagaattaaaatttttgaaataatagactaaacagttatcatcaatataactatccagactctttaccatactcaacttcaataacttgttcatcaactgatgagttagtatttgaatttgtattcttaaaagtttctaaattaccattaccagttaataatgaaccatcacctaattgtgaaatatcaaaaccattttcatttaaataagctaaaaattcaaaatcttctctttgcattgcttcttgatcaactgctggtaaaccaaataatgctaaaatacctgcaaaaattgctaatgatgatgcaagccagaatggaacttgtaaacctttaacaccaggataatgtttttgaaatgatgggaatgcataagtaccaacgaatgcaccaattttaccaactgcagctgcaataccataataaacacctctaactggagttgcagaagttttagcagctaataaaccaatattatcacctggaccaaattcacctaatgtcataaaaataccataaactacaacgaatgcaccaatatgttgttcaagttgtggataaagacctgccataatataaccaataattgcttgtaagaaaataccaacaactaaagttactcttggaccaaaataatcagttgcatatagcaccaaggaatgaacctggtaaatagaaaagatttaaaacaacattccaaccaaaagttttatataaatcaccatctggaataactctctttaaaattggtgatgaataaataccaaatgcataagcggagaaatcataaacccaccaaataattgaaacaattaataatctgaaccaataatatttaataattaataagatagggaattctagtatgtttgaaatttaatttttggaattgtgtaccttctttaaagaataatctcattatgaataaagaaattggaggaattgcaccaatacctaaagtaattctccaaacaggttgtaaatgatctttaccacaaatccataataaaaccattggaacaaaagctgagataacaaagccaaaatcaatcataaaattagtaaaccaagtaaaatatctatttcttttacctgcaggtaataaagatgaagcttcagcacaaggcagctgaaccagttggatattctgcaccaatgaaataacctaaaaagaatctataagcagttaaagccgcaaataaaccacctgcattaccaccaacatgagcttgagtacctttaccccaagaacctgcagctaaaattagagaaaaggattaaaccaccagaatgatacaagcataccaacttttcttgagatataatcagagaaaacaccaaaacttaattgaccaataacagtaccaacaaaggcaattgcagaaacattttgtaaagcacgagattcggtatattgatcaccataaatgatggaaagacaagttgaagcggtaccgatagagttattaacataaccatcagagaataaacctgcaccagctgtaaagataggccagtaatcttttttaccacttggagcaatatcttcttcttcaattgtaacaatgttaccatttttatcagtaacttctaagacttgtaaatcttcaggggtaatagtatttctaccccaagtaatttcctttttaataatagatggtaattctttgaaaggcattcttgttgcttggagagatagaaaaagaaaataaaataaaatatcaaaatattaatataaatatcaaaataaataaaacatgcatgaatagtgaaatacctgagaaatagacaagtttaaatagaccagaaagtgaatttaagaagacggagaaatgaaaagaaaagaaaagaaaagaaaaaaaaaagaagcagataacaataacgcggcaaattaattattaagttatgacattgagttttaaagttttattaagttattaaattacatgtgcatattaaattattaaattatccttcctaagtaagtaatatctttctcctgtaacactctaatatgatcctttgagttatttatccatatcaacgtgccctaactaaagaattctaataattaattgaatatagtacttggttacttaattgatgtattattattatgtattactatgtattactaaccttattactattattaaccttatcattacaactactatattaaagtttaacgaatactcggaaaaaacaataaccgcttctaattttccatttacttgtacagagataagagataagatagcaagatagcaaaagatgtaggaaaggggaaaaaaaagaggggggcgatgtgcatgctaaatttttatccatagagataagtgataacgtaactgttatagtatagaaatcaaacgctcatctcatcgtagagaaagtactaaaaataataactgtatttaatgtacaatttgacatattaacagtcaaaagatgtaagtacaatttcaaaaactgttgatgatggggtatacaataacccttacatcaatacgggaataaccctctgttaaatgtatacaatttgcacgtgggagagagtgtacagttaatattattggcatgtgaaaagtgaaaaggggttatatactgttaccatgtgaaaatactgttatctttcattaatttaatttcgcggctgtgttgtttgaattttttaaatttgaaaaagagagataaggatttattagtattatactataaattacttccattacatcatccattactacattacaaaatattgacaggagagatgggatagttgattgagtaactgtacagataacttagttgacaaataatgtaatgatattagtagatattaataacttactccttcacaatattgataaggactaatattatcataatagttgttataatttagtacctgaacgtgggagatggcattgatcaaacgttacttctacacatggggagcccaatttattttaatttacgtaatattttaatactagcacatgctcatttttcggtaattgacttactacacaagaataatcactattactatatttaatttcatcaggactcttccaaatgttgagcttgctaatactctttaagaacatgaaactttttcatatctgaaattaaaattaggcagtttgataaataaacttattaatagcacttcctggaaaattctttattattatgttttttaagttaagagttaatttggagatctttcaacgtagcattccataagtgttaggaaattattctcttcttcttctgcaatagataatcattagtaactaatcttgaataattaaaacaaaaaatgtatacttttcattttttttctatacatttgtctgcatagaggaatttctttttcctcttaatattgatgttctgaatatcctcattatgcatcacaaatgtaaaaatttcttcctttcatcttgtaaaatcaatcaaccatcaggtttaaattcataagtaaacataataccgattggaaacgcgttttagtaatgtcacgtatataggtaagtcgatacgacgattgtgaaataatcaaaacatgacgcgtaaggaataagtgaaattatttttagcattatacattcaagattctacaaaatttcagttagtatttcataaagcttttcaatagaggcaattatatacactaaccgccattacaaacagcttactatcatcaaatggaagtgtttgaacaactggaagaaaattcagaaaagaatgctaactacttattagtaaataataatttagataataatatagataataataatgatattgaaaataatgattataatgatgatgataatgaaaatgaaaatgatgattatttagcacatcattctaaaatattatctcaacaatttggtattcaaaatgatgatgatatagatacaagtacgaataatcatagtaataataataaatctcgtgatttgacaagtgtagttcaaaagatgaaacttaaattattacaaagagaagagaaaaagaaagctcaagataatcaagataatataatattaactaaagaaacttcaactcaaattcaaatacaagatcaatcaactcaaattgtagtcactcaagattttaatgatgaaaataatttccaaactcaacctataaagtctacacctattggaaaatttgatgaaatttcaacaaatattatacaaactaacgataatgatattcttgaaaatgataatctaggaactgatgaaatatccactaatgttatacaaactaatcaaaatgatgaagatgacgatgatgatgatgatgatgatgatgatgatgatgatgatgatgatgatgatgatgatgatgatgatgatgatgatgatgatgatgatgatgatgatgatgatgatgatgatgatgacgatgaaataattaaagttaaacctcgtactcttaaaattactgatgaagataccaaccgagaagaagaagacaataattatgatgacgacgatgatgatgatgatgaggatgatattatcaaaccaacccaaagaagaaaccgtattgttgatgaagatacagctaataatgaaaaaaacgcaatttcaacatcaaatatgacttcattatttgttcaagatgaagatggtgatgaaaatggtgataatattgaagaccaagttaatgcatttcataaaatgacaaaagaacatgatttcctatcaagaaaagtttcagcagcaaatgaacataacactgatgatgattatctgctgaataaatcaaaaatgaccttaaatcgtaaagagataattgaagagaaaagaattaaacgtgaagaattagctagacaattccttcaaaatgaattacttaaaaaggctgctgctaaaattgaaaaaattaatccaaccacttactcaaaacaaaagttattaagttcgttaaaggcggatgcttcaaactctgataatgatgattctgataatgaaatcaataataacacaaaaattgaaattgtcaaaagagaaaatactgattctgataacacacaattttcaaatttagattcacaggaaattaattcaccttcaacttctccacttgttgaaaatcataaaaagaaaataactatcaaaagtgttttaaaaagttggaaaacttcatcaacgcataattctgagtcaaaattagttgaattaaaaaatgaaaagatagatgatgaaagtactaaaacacacatcaatctcgatgattcttcagatgatgaagatgatgatatggacgtaacaatgattaaaaagactaaaactttagatataaaattaatattatcaagaaaacaaaagaataaaatagagaaagttcaaaaagaaacattagctgataaaattaagaaactaaatgctaaacaattaaaaatgaaatatatgaaatcattaaatgatgaccaatataatcttaaatcaaataaagagaatggtgatttaactgatgaaatgttagctaaaatgttgtatgaagaacagattaaaaattctaagcgtttaaaacaacaaagtaaacttgaaaaacaaaaagaattattaagaaaaggtaaattcccatctcatgatgatgaatctgaagatgatccagaattcagtgaatattcaagtgaatttgatatgtctgatgatgaagtacaagttgaaaatgaagatccagaaggaaaaaatgaagataaagaagaagttgccacagaagataataagaaagaatctgaaccagttatatcaacacaaaatattcaagatgatacatcttttaagttaactcaaaatgatgcattgaaagattttaatttttcatttggtgaacttgcagatcaagatccaactcaaaaatcacaatcacatttaactactcaagaaaaatttaagaggttaaaaaatattagtatgactgaacttcaggatgaaaattcatcgaattcaatatcaatagataatgaatcaagaatatcgaatgatacttcatttttaacaaaacaactaaataatgctgatgccaatgaaaatcaaatccaaaaaagtactagtaatgataatgaatcaaataaaataaatttcaaagaacttcttgattcacaaaatcttattcttgaaactcaaattgaccaacctttagaattaactcaatctgtctcacaatctttaaatacccaaaatgataataatctatttgattcaagtactcaaaaccttgagagaacagaaacgatagaaattgaaaaaaccgatacagtagataatattatggatactaaaaaagggggaagaaaaagcaggtgatgaaaaagaagaagaagaagaagaagatgatgatgatgatgatgatgatgatgatgatgatgatgatgatgatgaaaagattaaaattccaagaaaagttcgacttgacaatgactctgatgataatgattctgaagttgaagaaactgaagaagatagacaaaaagttgcagagttaattaagttagctaaaaagaaagaaagagaattagctaaacaacgtgaacgtgaatttaaatctaaaggacttggagatattatggaaaatgaagctgttgaatctgatgatgaatatcacggggttggtggtgcagatagagatttatcagatgaagaaaatagtgaagatgaaaaattaattgatgatgcaagtaatattcaaactgatgaacatgaaataagacgttatcagcttgagaatgaattaaaggaagatcaagaaaaagtttctagaactttcaaagatattaaaactcataatttaactaaaagaagggcaaaagatggtatttatgcagtggatttatccgatgatgaagatggtgaagagaatgaagaattattacgttggcgtgaattaatcagaagacgtaaaattaaagaaaggaaagagttcatggcaaataataaatataatatttcagaaaatgatccaaagaaaccattttttgatacaatggcagtcaatttaccttcacatatttcaatttataaagattcattatcgttaactgaacttgatgaagataattctgatcatgaagctaaagatgtaaacgataatgatacaatcactaaaagagattttcaagattattacaataatacaaataatgaaattccatcttctagtgcttcattgaaaagacgcaagctcaataaagttaaatcatttaatgatgatgatgatattagattcagttcattcaaagatcaagaatatgagagagcaagatatgaagttttatcaactgatgaggaagatgatgatgatcatgatggttctaaacaattaagaatgttaaagaagaaaacttctgtcaaactgcaaagaagaaatcatttgaatagatcaacgactagtatttctgaagatgtacatgatgaattttcagttggacttttgtcaaataaatctaattcaattactgcatcatttaaaaagattacagagaaaaaggttaaaattagtgctaatacaggtaaaatcatcagagatgtccaagttacaacatcatctaaatcaattgccaattctaaagttgctgtttccagactaacatcaaatgaatctgagaataataatttaatgaagaaaccaataaaaggttcaggtattgatagactcgatagaatgcttgctaaaggtagaaagctgggtatcaaaaaattatcaaaacatcactgattgatagtctttatagaaaattgtgtacattatatttttataaattttaggtattatagcaaagaagtagattatatatattattacaaagttgattggttgttatgcatgtgaaacaaaccaagtaagatggttttatggttcattggccagcgcatctcttagtgcactataactgacccttgaactaaccactgagttttgattgaaactagagccatatccatgtcttaccatacgtcttccatttctatcaattgttaaagatgaggaggaggagttaaaggttggacgttcatttaaaatatttctattcaactttattggtttagtggttttttgtgggccagctccattttgtctttctctattcaaaaaactctctgatggcaatgtttcagagtcattgttatttattttgtcaacatcaccactcatgaaagtcgaattcggaatgaaacttttaatccaagatgaaattggttcatcattggtataatcatcatttattgatgaagcttgattattcagttttggaactgaaataggagttgaaaatattttagaaggtatccaagaattgattaatggggttttagaagcatcctcgtaaatttgagtcttatcagaacaggtaggtgatgaaatatttaaattattgacattagaattcaaaatgtttaacatatcctcatgcacattagtgctatccttgaatgtattaaagaaagcggtatatggttgagcagatgatgatacaattgggttattcggtttcaaccatttcatagtttgagccttaagatcaagatttttctcccttagtggatattgttttgctgattttggatccacagagaatatactttcatgtgatttacttcgttttaatgtcataagtgatggtttcttaaaaaccaatggtgttacattttcactaccataactatcagtcgaatcagaatcagataatccttcattataattattatattcatcatggtctatatcactataactgccattaattgatgttttgttaacagaatatctcttctttcttttgtatcttgattttatgtttgatatattagtttgatcaaacgaaaagagtgagtcagtaatttcagtatgtttaagtttatcattcaagaatcttttattcaaagcagccccatcagacacaaaatgacgtagagattcatcacttgaaattccacctggcgatctattaggtaatgatatatgatgtctaagttgtcttttatcaaaagatatcgtgatgtcttggtaggtatcttgatcagattctatcatttctgattgaacattaccacgcaaatcatcaaaaagttcaaatgtctcatcaactccttcatcaattggtggaagatcaattaattccaattgttttttcattgattttgaggaaactttacccctaatagttttggtattttgcgttttcttctctgtgctatcatacaatgggttttcactcatagtatttattttaaatcctttcagtggataaatttctacttctttttttgattgcataggtgttatattgtgattaaaatttaagaaactttccatttttaataacttcttttctttctgaacatcgttaggatttcgttttgtgtctttgattgttgaaagagatatctcagaagatgaataaccttcatccattgatggttgtaaatctgagttggagaatatggaagttgatctcatatctgagtgttgtgaaataattgatttatcattaaataaactatcttttggtatgtgatcattgacaactgttaattgttctttaagataatcgaattccgtacacaggttatctaatgtagtctcagttgttctccattcaattttagaattaaaatcatcaggtttgaataaataagtatcatctttaactttatgctttctttcaagattattaacttgcttttgtaaaaattcacatcttagattcagggaagtcatatgttgttcaaaaatatctaaattctctaattgggtttcaatattatacagttgatcatttttggctgatatttctctgttaagtgataataattttttctgtaatttttattgacatctaatacttttttggattccctttcttgagaagataacccagttctaaaagaatgcattataggagacaagtaaaatataaatatttttcaaacttaacctttccgcttttcttatagcaaaatctagagcactgccttaccaaatataaattaaacaaaagagtaaataaatgtaactcgtaacaaagtaaactaaagttaaagttaatttgtacaagtcaaatcatagtcaaatcattaataactgttgaagatgtttttttcattacaatgttgatgttaaaaaaatctttgtttaccttttgccagatcgggacaggcgcggtacaaattatggcttatctatagacagggtctagtgacagtatataatataggtttatagtatttagtaaagggtatgtgttatataaattacatgaatattaaagagtaaagtcatcaatgagctttaattgttctgcaatatcggactgcactttcttctgtttttcctcagtcttgacatcattagccaaatcttccttcagtttatctgtgttcaaacttgataatccaacctctttcttactttcaggatcactttcgttgccatcaacagtggcttttgtgtctgtatttgtttccattgacatcattatgttcattatgtcatcttctgtagtattattatccattttttcaatcatcgctttaacacttttactcattgacttttgtttggtctttgtcaatggcttgtttggtttctttattttatcattcttattctttgtgttcttgttattattattcttaccacgaaacatctctgtatgttactctaaagaagtaaacctatgttgaatctactatataatgtacattaagtaacatgaattttttttgaaaaaaaattttttgaagatgagaaatttcctaaacggggttaccacgaataaaaaaatttttcacatcattaacttagattaaggtcttagaaatttactatactgtttcttctaaaagatttttgagacaacgaaaatttatacaaagcaatggtttcaacacataaaaaagaaaaaccttgggatactccagatattgataaatggaagattgatgaattcaaaccagaagataatgcaagtggatctgcattccttgaagaatcgtcattcatgacacttttcccaaaatatagagaagaatatcttaaatctgtatgggcagatgttacaaaagctcttcaaagacatcatattgattgtactctagatttggttgaaggttcaatgactgttaaaactaccaaaaaaacttttgatccagttcaaattttaaatgcaagagatttgataaaattattagcaagatcagttccattccctcaagctgttaaaattttacaagatgatattgcatgtgaagtgataaagattgatggctattgttcaaataaggaaagattcattaagagaagacaaagattaattggtccaagtggtaatactttaaaagctttagaattattaactgattgttatatgttagttcaaggtaatacagttgcagttatgggacctcatcaaggtttgaaaactttaagacgagtaattgaagattgtatgcaaaacattcatccaatttatcatattaaagaattaatgatcaaaaaagaattagctaaaaatcccgatttagcagaagaaaattggtcaagattcctaccacaatttaagaagaagagtgttgcgcgtaagaaacctaaacaatctaaagaaaaggctaaggtttacactccatttcctccacaacagttacctcgtaaggttgatcttcaaattgaatctggtgaatatttcttaagtaaaaaggaaaagaaggtcaaagaattacaagaaaagaaaaagaaacaagatgatatgaaggaagtaaggcaagaagaaagagcaaaagattacgtggctcctgaagaagatgttagagaaaacccacttttgaaaaaaagtaaaaagagaaagaatgatgatgttgaaggtgatgatagtgaaaatactgagacttctgaaggtaaaaaagaaaagaaagaaaagagaagtaaaaaggataagaaacgtaaatcttctgaagaatgattttactttgaatcatctacattttcgcatgctattatattatatttgtacacaatttttttataaattaaggttagatagatcattttcacctatatttgggtatattttaaaagctagattagtatattatggattccattgtctggcttgagtaactgatgccatattttcaccaattatcgaaagtgttccatcatttaaagttaatcgatttactgtaatattatcagaattattgttatttgtcaatgtactttcatctttccatatggaacctgaatcttgattttttttacgcatcttctcttcttgttcttttattattcgatccaatgaatctgtagcactgtattcactatcattgtgattttgaaaaactttatagttttcagataaataatgatccatacgtggtttggattccgtaggtgtaggtacgtagttggttttagctttaatgtattgatttctaatattttggattattttggaaagtctgggtattgaagtatcgttattttcctgatacaacaaagttttaaaactttcaacatcaaatggttctcttagagtggattctgaatccttttgaacgttgtcatttgatttcattgtcttctcgttcaacatgaagttatcatcatcatcatcatcatcatcacttttcccaccagttgaactaacatcattagaatatttctcggagttactagccttttgtcttttcctaattctccattctcttactagcaatattgacaatccaaccatgctaaacaaaaaccaaatcccaagaatacataaggaaatataaagcaatatcatgttttgatgtttatagaatttaattacttgatttaaaatattctttgctttacttttaaacttttcaacagagtcatcaaatgaatcattaacattggcagctttaatagatgccatttcagctagaatagttttcggatttaattctgacatctctaaatgggcattatctgataaccatgtcattgcattttcaatttttttaagtttggattcaataacacatccaacaatttgttcaataggttcatataatggagttcctttgaataatgcatctaaagctttattcattttttcatcaaattcagatactgtattattaatagtcatagctgcagtatcaacccatgcaaatagattatcattaatatcatcttgataagtcacctatataattattggtctcatttgtccattgattcaaagaatcattgaacgatccatatatttgagtttgtgtgttatgaaaaagctcatttcctttctgtgagaaatcaagattggaaataaaagacagaattatgaattgacaaataacagttgcaattcctaataagcctagtaataggaatgaaagcaagaatggtgatgcagaataattgaaaaaccatcgtatattgtttattaatataggatttcttaaacgaaatatcttttctgtgataattgaactcaggaaattagatgttctatcttgcataattttgataacttcaacattatattttttcttacttgaagatttaataaatgattcatttgtaaaatttaaatgatttgcagcttccattaatcttctccaatcctttaactctctataaagttcatatccaataagcagtaatgcagctaatccaattatccccatgaataacatgtgtcgttacttgagcaacattaatcatatcaacataaatttcatttattttggtacttccattactaaaatcaagttgagttttaggtggtacatacatggaatctgcatcaaatgtattattcaaatgagtattaacttgtcttttcaattcaccaaatggtttatcaattatttttcgggtaaaattttgaacatcagtaaaatcaggtattttatcctttaaatcttcaattttatcattaatactaccaggtatttgccaatcttgcatatttttgatagttaaattaactttatttaattgttcatctaaattagattgttgattagtcttaccaccacttttaaataaatgttttaatgcatcacccgtatcatcagctgtatgtatcacatcatttattacatctgataaatcacctaacccaacatttaattcctttgcaaatgaaatcaaagtatcatttgcagtagttataacactctcagttgcattcaatgctaccataacagtatcatcaataactgcggttaacaaacaagcataagtaccaactgataattcaattatgaacattattaattcttcacttgcagtaatcattaaagtcagagttttcattaagccatgatttgcagattctatagatttagcaatcataagatttgaagcttttgatatataatgtgggaatgaaacaatatcagatgcgtatatacctattgaatcatataatgcatgagtttgagatttagcttgttctaatgaattaactaatgaattaagaaaaataatagttttataatgaaaagcaataaaaatacagtatatggattcagcaatagttgtgttaatttctctttgaaattcaaatatggtcttctgtaatagtttgtctcaatggtagacggatgagtaaacgttgttgtcattagttgataataggggtataaagaatgtaattactcaaagaaagagtgttagtaaagcattatcattatgttaaatctcatacatctgggtatatggtattgtaatactaatgattgtttaccagaggtattttacatgttctacaaagatctaattattgccaaaccatcatgttaacgttctgccaccaacatgaaacaagggtgagacaattcaaaaaaactgattacgtaataaattattgataattcactttaaattaacttactgttaactcactttatcatcacagaagtacagtgtcagttttaagtataattgaggattatctataatttaaagatgaaggttttgatgggaagtattaagtaataacaattttaacgttttatagaaatcttagagaataatacataattaaatatctaaaccatcagttgaaccccaactgtaaatattccaacctaatgaacctgcttcatcaccataaagaagtttacattcatcacctcttgatgcacctgctgcaacaatagcaggtaaaagatgttcatttgtagggtgagcagctttatatatttctttccattctggatttcttggtaattgtttcaatgcctctaattgatcttcatgttttgtatcaagtaaaagtttatttataatttcatggaatggtttattataatgtaatggtttattacctaaagctctagccatatgatgatctcttaaattatgaactgacataccagagaataaaattgcaccatttaaatctctatatttacttaaagcttcacctaatctataatgaatttcaatatcagaatgtacctgcaagtgaaacttgaattaatggtacttcaacatctaatttatttgaatctgcaatagttggatcaccaaaagcaacttttaaaggaacgaaaacaccatgatcaatacctctttcttgagttttagactggaaccaatctgattcttttaaagttttaacaatatcattggcaataaatttatttggaactgtatgaaattgagtttcataaaatcttttaggaaatccataataatcataaattaaaccattttcatcagatctaatttttttagaagttacagaattttgggtataccaagcttcaccaataccaggtaatgcaacttcaatttcatcaggtttatttgtttgccaatgagctgatacaactataataaaatcaggtttaactttattttgaatatatctaccaacttttttagttgtttcccaagcacctggattatcaagaccatcagcaaaatcatggtccaccatgagagaaaaagaaaattggtaatggtttctttgatggagattcattaaatacgaaagtgttcagattcagccatagttatatttttaatgttatcaattattcttgtcgatgatttatttgcagaatttaaaatttataaaatatagacattaaaatgatgattaaagtaatgagaatatgactagtatttataccaagattcatttattcaaccatttgatgtcaatgagaaatactgtctcaatttgaaccacaatttgtaattatttatactaaaaaaataatgaatcaaccacattaataagagaattaataagagatcatcgattattaaagctgacaaactacggtgcacagcctgaaaggtttttttattgtaagatccaacactgccgacttttgaaattattaatccaagtagtagataatattatgtaatcaggtgatattttcaaaaaatttactgtgttataaagcgtggcgcattattaaattaattattaggaggaacagttattatggttaacttaatgataatggtatttgttgttatgttaagaatataaataaatattaaataaataatctgctaatataaagtaattgacttgattaattaattaattaaagaaataaagttatattattttgtacgataatactagtatctatcacctgtacctgccattggtgggaattcagtattatcagtatccagtacatgtttacatttacaccaatctctttccttatcaggggtaactattcataattgatgcaatatgagatttttcaacagattttggtgtagttgatatacttgtccatgaaactccattacataatggacagaatgcagtatttgctgtatttgttgtatttgttgtattagaatctgatgtaactggaattgaaattggaatcgaattttgattttgatgaactcatttgtgtattgttttatataaaggaaagtaacttattaatagtagagatagaagaaaaataatagtattcaaataagttgaaacgaaactaaataaagaaaaggggaagtgttgtgatttttataataaattttatttaatactaaaatactaaaataaccttagttacaccccacattttccagcaaatcatggaaagagacaccgacgtattgtaaagtcacactatgaaaaagcttaaataaaggcaacatacagcttgctcccgggcgataaccttatctgtggggaaatttttgtggggtgggatatttatcggatagtgaatcatctccggggttgtaaattaagacagttaatcattttacggtgtattatcttttaattaaattatataagtattctctattcataaaccttagcctaagcattctcaatgataacatctgcatcttcatctgcttcaacttcaaatgtaatatttggcattcaaactactaggtttctttattatttactggtacaattttttcaacaattctatcaactggaacaactttttcaataattctttcaataactttttcaaccacaattggttcttgttttgatgcatcggttttatcttctaccttaggcaacataaccttcttcttgttgtggaatatatgttggaccaacagtttcagtaatatcacccataccccaaaatgtcatcatacaaaggaaacctgttgcaattgcaacttctaaatctgccttattttcatcaattgttaattcataatcaaattttctttgtctcattaatctaacatgtgcaatacgttctctagtttcttcttcattaccacctggatttgtaattctttctaaaaatttactacctcttgtccaaacatatttatgaccatcattgagataaaaagttcttaatctacctgataaaccattttcagcttgtaaaactctatgttgtaaaccttgctttttatggaaatcaaaagattttaaaaagaaacctgctctaattgtaacaatttcatgtctattaggatatgtgaaacattgaccaagttggagttgatgcactctctctttcaattgtataaatcttattacctttatgatcaaagatattaatttttgtttgtctacttttattatcccttctaatatgaacagattttgttggtactaaaggtacaaaatttgcatcagttgaatgtaaatcaattacaggtttaatatatgcatgctgaataaaatatgtagcaatagtaattaaagtactttgtacataaactgcaggagattcaaaaataggcattttaaaggtatttaaaagattttaaaaattaattaataaatttagttaattggtagcaaaagaggttttgaaaaattagaatgattcagatccttgataaacgaaataaattaaaatagatgaaaagcaaagaaatagtaaagaaaaagagtgtaaagtaaaagaatattagctgcaagggatacaagaaacaggttaacactcttaaaatgggtattcaagctgattaattgccttgttataaagagggaatatccctctttattcatacaccacaacaaagaaaatgtcgtggggctggtataatttgatgattattattatgtaagcatctttcataggttcttacactataatgcatgcatggtgtaaagaacatgcatctacgatgggttactacgatgttcatatcatgatactgtacatacttcatctttatctataatgtattaaaagttttttctctatgtagattaattatattatactagttgaatcgatctaaattaaatcaaagtaaattaaaaaatattccaagcatcttctgcaccatgacacattttactacaagcaacagatgctgataatggatattctgataaaccaattttctcatctatcatttcatcagcaaaattatctttacctcttgccattgcaccaacgaaaacacataaactttcatcatcatctaatgttttaatataatcttgtgatttaacaacttctgcatcgaatgataatgtaattttacgacatttagttggtaaatgatctgtaattggatttttaataacttttaataatttttcctcagaatcaacacttctaattgataattgatgaagtaattgaaccattaaacctgaaaatcttttaaatgttcttggaattctaactgatggattaacttcaattaaaacatttttagctgttaaaatatatacttgtaatttacccgctttatttactggcgaatctaataatgttaataaacattgatgtgtaatatctggtcttgcttctgaaatatcacgtcccatctttcttaataaaccttgatgatcatcacaatttaataaaacatatttattatgtcccggtccactactacttgtaactttttgtgtctctaaacacgcttgtgttagaactactattagcctttgtgtagttttatcattggaatttaatgcctttggttgttgtggaacgagtgatgcttcaggtacatctcttttaatcccacgttttttagcatttaatgcatctctctccttagaatcactaaccatttcctatatattaaccttactttttaaaagatcagtcaaagcaaatatttatttgagttgataaatttaaagtgtgtaactgaaaaaaaatttttattttcaaattcttattatcttaaaagtgcggtaccggtgttaagtaaattctaagtaatttggaactaaaagcacaatgctcagcttgaaaggcttgtatattttatagcaaatcgaacaagtattagtgaatctgctcatgctattacgatgagtgataatgattcatttggagatgatgatgactttgattttgatacagtttataaagtagccgagaaggtccagcaattacaaaatacccaattacaaacccaattgaaatcacaaacgccaaaattaattcaaaataataacactaagcaaggcaataccaaatgataaaagtatcaataatgatcaaatatatgaaattaagggagaaaatgcaattttgagaggtcaaattgctaaattacagaaagaacaaactgaattacaaaataaattaaaattagattttgatcaactattaaagaataaagatctgaatattgaatcattaactgatactataaataaattaaaatcagagaatgaatttttagtctcagagaataagaatttataccaatcaaatagtaaaaaaaggaaaataaagtcaaatgaatcgtatttggaatatgacacatcaaatggtaataattcaaataatttgatttcaacatcaacacaaaatacttcaggtattttatcaccgaagaacaataatggtattaatgaggcattgaatattatttcagatgataatgtaaaagaagaagttaaagttatattgatgaatcaagctacttttttccaagatgaaaagacattatttatagaagcaatttcaaacttctccataccaggtatgaagaaaccaacattaaattatcttgaaaatattaattctacattcacttacattaatgaagatttcaaaatcttcaagaatgaaaatagttttaagtctgcaattttgaagtatttagtaaatttccaagaaaaaaatagaatagattatttattactaaattttatcaatatattagttgaatatattatgaaatgtgattttcaaaatgtggaaaatacacaattacttccagttccatatttactatctttgattaacttttcattaaattacaaacctaaagctataaatgatgtttttataggtaaagtaacagataatgtaattcaattattacttaatttccaagaactatttaaacctgaatttgactatttatcattaccaggctctagtcaaatgattaattttataaaactacaaaatgacagtgagaataatgaagtttttgattatttatttattgaaaaaacaatgcatatcaaaatacttgaagttttcagtgcaacttttcttatggatatattaacaaccataagtaaggttacatcatttcatatgtttacatttacaaattccaagagtagtatttatttttggaatatgatacctcaacaacttttcatcaacagtttcctttcaataaagacaccaattcattttatttatagtaccatcgtcatactgattaattctgttgttgatgatgataaatttgctttcaaaaatgcaggtaagagtaagggtaatacaaatgataatactgtcaaaatcttagaacatgtcatgcaatttttgttgaaattggaaccatctcaaatacaattgaatgtttatggattgaatagaatgattggtagcaataaccatttagaattattaaatataatttcaatcccatcaaatgaattatcatcacagcctaaaaccaattcatttgatacgtacaatagaatacttaatgaagatgataatgatttcaaagacttttcaaatcaggaattttatatattgaagacaaagatgttgattttggaattatttgaaaccttttattcaacattgataatgatttcattaccattgaatttaaatttgaacttaattcaaatattgtgccagttagtcggtgaagaacaagaaattatctatagaaatttcagatcagttaataacaatttaaggattgaattaatttctaaatcaattaagatcatgcattatctaataacacaggaagaacaagttacaagcacaggattatctaattcaacattaagagaaatgataattgtaatgttaagaatattatccaacaatatgaaaaatatttctattgagttcattaccaatttgcgtaaaaatttaaaggtatatgatcttgtattcaacaagccattagagtttaaagaacatgataagtttggaacattaaataaaattttatctattgatcaaaataaaaacttaacagaggatgaaatcgatgaacttgtaaataatatgatacaaattgatattgattcatacaatggtattgaatttaattatccctgatgaaacaatctctctagctagagatattgttgaatcatcagttacagttgatgaagcggatagactacatgaaagtattaattacaatgatcaaaatttcaataacaacgatgtagatattgaaatgatgtataataattaaaggcaataaataaatatcaaaaactttctttctaatggttttttttataactggtttcttttaattgattagttttaacaaattacttaataatataaaaattatattcaaattatttaattttcagattggaaaccgttcttgaattttctagaaacgtattttaagtaagtcattctaccggtaccagtagttcttcttctctttgctttgttagcccagttgtattttctcattttagctgctgggtaaccacatgaagcacaagtcttcttttggttgtggaaagatctcttaccacatctcttacataaagtatgagatttaacgtgtttcttacctaaagatggagtaccttctgttggaaattaaaatgttagggggaaatagttagttagtattttgctcatagtaaaatttttcgaatgaaaattcttcagaagtgtaagggagatatatttcaacaattgattactgataatttttgaggaaacttgatataatgtaaatactaatttgatgtaaaatgatatcttgtaatattgtatttcaaatgaaacttgaataattgaattcagtaataatacttttgtttatatgatagttatatgttatctaaattgaacatttcaatcattggaatatgttcagtattcttgtgattttcaaatatatggtaacatctcaagctgataatatctcatgtacattctgtcgatatatgtgttatctagtggatactagtgctatatgtacgtactactcatattggttatgtatgataaataaaagaaggtaaaattagaaggtaaaattattaacaaatttctactataataattacaacaattgaagaaaatatttcatacactatactttcatcacccatacaattcgcactgagagggaggcaatttctgagagaaattattttttttctacggggagtgaagtgtgtgtggtgtgagggggagcttcattttcatttattactgacaataaaatgtgtttatgcgcgtcctttccaaattttcaataaattccaaatgttgtgaccgttaaatgttatagcttttgcacgtgacgagggtttagtttttgaaagagggtttggaaatcttttcaaattttcattttattttggtgttacgcgtctctctagtttgatacgcgtaattgtttacatgttttggtgtgttaaagacgtgtttaggtgggtgataatgtgttttgaaaataattttaaagaattgctctgtaaataccaaattattctaatatttatccttgaatagttatctctttgaataaccaaccaaatagcaatgaatattaattcacaatttcctccttcttctcctttattggataatgaagaattagaggttggtaaaccttcaattattagtaattctaataaatccattcaacaatcaaatggttattttaccccagatccatcctcatcattaggtgatactacaattaatagtgatggcatgaaatcagataattacaattcagatggtcaaggtgataacgatattgataataatgatggtggatctaatcatccagtttctgaagtttcatttgttaataataacgacattaatgaaccaatagccattgctgctgctcagcctacaattaataagattgataaatctcaacctttaagccctaagaatttccataatgttattcatgttcctcttaatggcgatgttttcaaaattggtagatcaggtttatcatgcagtttcaaattaaattcaagtaataaattaatttcaagagttcatgctgaaatttattatgatcaatctgagagcttagtagttttgaaatgtgttggattcaatggtttgaatataacaattccacatcaaattggtgttagcaaacttgaagaaaaacaatacttaatctcaatcaatgataatattgatactgacgatgaagaatatattgcctcctcatcaagaattctaaacagaaattctacctttacaaatttttatatgttgaaaaatgaaactatcaaaatgcctttaattgaaggtacagtattagatttcagaggtgagcttgcgctgttagttttcaataacaataaaataacaattgatccaaagactcaagttatttctaaaacatcaattactgcatctccaatcaaaaataaggcaagaaaactatccactggtgaattatctgatatcgtcaaacaaaagaaacttcaattctcaactcatccaactttaagtgaaattgaaagtagaaataaaaatagaaacacagaaattaaatcacttaatgatgatgatacaaaatcaggtgcaagacccgttccaaaatctgttctttcaaatacaattatttataaacgtccaactccaataaatacaccagttagaacaccagttaatattcatgttcatgatgataaagaaaatatcaatgttccagcaaaacctataaaagaaactaacaataaaccatcaattagagaaccattagctaaattaccagttaataacagttatatggataatacaccaccacctatttcatcacaaaaaccatttatcacagaacacacacctacaccacaatcaataacgacacaattttcgattgatgaacaaataatgaataacatttcaaagaaaaatactgaatcaacctcaaatgaagaattgaaagaaaatcataataattatgctaatgaagaatcgaaaaagagaggtagaccaaagaaagcaaaacaatcagaagaggaaattttaaagaatatgccaggagaggaaattgattcaattttagcaacagtacctgaattagatgatatttctaacttaataaccaatcatattgcatattcaagagttttacaaacacctttcaaatcacttttagaattaaattctattaaaaagcatcaattaagtaaattacaattacgttgtgttttaattcattatattgattgtattggcgttattttcagaaagggtaaggatgcagcaggtaaacaattagatgaagaatactattatgttcccgaaaaggataatgatatccaaagagttcaattagtcgaagagctgaaaggatcatcttctcaattaagaagttgtagaaagactcataaacaatatttctggaaaaagccaaagatttaatctaatctgctctacattaattttccattatttaattcatcattttatttaagcattcaattatttctatgtatttattttttttgtattttgtattagtttttcatactctcttcttatcttatcaattacgattctgagaaactaaattttccggaggctcaatatgattcaaagtgagtcaaaaaaaaattatcacgtggaaacgcgcaatcggaggaagaaagcctgacatccacaagttactgtggaatcaaatcatacagagaagttacttatcaatcaattaaacacaccgtgataacagattgactacatgtgcatctcattgatcaatgaataagattaataaactaattaattctggttaaatgtgaatttcacatgctaaacgaaataaattttgaattcatgattaagatccgaagaagttgaaaaattatataatcgagccaacgtttttttcctgtaatcgctacacagaaatctgatttgggttcatttaatcgagtgtactatgtaaatttaagttagcatatcttgatgcctaattcaattgaatctcgtagtattcttctcaataaaatgtaataagattgtagataaagctgtatagttgaaacagaaattatctgtatacgatctgtatacgagctatacgacgtagaaaaagctaatatttcaataaggaaagccaataaatttaaaatcgcacatgcaaaaaaaccaataaaatttttttcacattcatattttccaaagttttataagtagagagttgtttgcccaaaattttcgttttcaatactggagtttagaagcttacatttatctatattcttttgatttattttctattatcaagacttttcaagttcaattattactattacaatgtccactggtgaacactttttctttacgtatgtattcactcttcatattcgatgatattgatatttatcgttattattgttattgttattgctattattattcaattataaaaaaatgtttcatgtgatccaggttactaacataatatctacttattcttaaatagttctgaatccgttggtgaaggtcacccagataagatctgtgatcaagtttctgatgctatcttagatgcatgtttagctgttgatccattatccaaagttgcatgtgaaactgctgcaaagactggtatgattatggttttcggtgaaattactaccaaggctcaaattgatttccaaaaagttattagagatactattaaacatattggttatgactcatctgaaaaaggtttcgattacaagacttgtaatgttttagttgcaattgaacaacaatcttctgatattgctcaaggtttacattatgaaaaagctttagaagaattaggtgctggtgatcaaggtattatgtttggttacgcaactgatgaaactgatgaaaaattaccattaactattttattagctcacaaattaaatgctgctatggcagatgcaagaagaaatggtactttaccatggttaagaccagatactaagacccaagttaccattgagtataaacatgataatggtgctgttgttcctcttagagttgataccgttgttatctctgctcaacatgctgatactatctcaactgaagatcttatttctgaattaaagaaacatatcatccaaaaagttataccagaacacttattagatgataagaccatttaccacattcaaccatccggtagattcgtcattggtggtccacaaggtgacgctggtttaactggtagaaagattattgttgatacttacggtggttggggtgctcacggtggtggtgctttctcaggtaaggatttctctaaggtcgatagatctgctgcttatgctgcaagatgggttgctaaatctttagttactgctggtttatgtagaagatgtttagttcaatgttcatatgctattggtgttgctgaaccattatctatctacattgattcatatggtacttctgaaaaatcatctgatgaattagttgcaattgttagaaagaactttgatttaagaccaggttgtttagtcaaggaattagacttagcaagaccaatttacttcaagactgcttcttacggtcatttcactaaccaagaaaatccatgggaacaaccaaaaaaattatcttactaaattaagtaatttgattttttgaaatcatcttttctattctagttcccattattttttaatacagattcaattaatcaaataaataaacttgattcaccgctcaactcgctgaacaaatgaaaactttaatgcaatacaattcccttttttttccacattttactttctcttttttttcaaacctttctttttcacactcccatcactttgtataattcccccctttttatatattgtttgagattcaatgatggattgagtcatcaactggcatctttctgttaatatagattattaattaaaagttttttccaaaatcattattgtcatccgaaacatttcaggaattcccacgaaaaattgtaattcttcgatctttcgcattgtatcagtttcataatttttttaaaagaaggcaatgcttcatctttatccctacttgcatgtatactatacgttccttaacccatcaacttagccaataaaccttcaattaacaacaaacacaatgggccgaaataataaaaagtatttcttaaactatgaggaagaggggcaaaaagaaggaaataaaggaaaaagaaattaaacagtttcaagaaattaaacagtttcaagaacctcaaaataagttctttgttaacggtgaattcaatgtggaaaaactacagtatgttcaactaatggatgaaatggttgattttcctgaaaatgttgcagtcattggtatgctagttggaatttcacgacgaatactagatggcaataatccagagaaacaaagtagaacaccatatatttttcatatgacagattttacaatccctgcattcataccggcggattttttcaataatcgtaattttggtagaaaagaactacataatagaacatatgatattcgagtctttcagcctggctttgatagaatttgtagagttattaaaagagacttaaacccttttgtaagatattttaaattatacagtgatacagcttatcattgtgataaaaatggtgttcttgaaaggatagaaaccatgagtcgtgaagatttacaatattattatctggataggtttaatatttggttagaattagaagcacaggtgtatttattcaaaggtgaaaaggaactgtcacatttaactcattttgtttatattccatcagaaaatctcgaagtttcattgaatcacattcatcaaaataggatttggctgatgtttaaggcagcttatgaaaaaactgggatgtttaaaaatatcttccaaaataacaatcaacggtttgaaactatagagattgatgatgatgacgatgactatgatgatcaatcatttgaatcggtaccaccgccatctaatctttttgaagatcatggtagtagtaattactcatataataacagcggtttaggcgaaagtactcaagtaatagataatactcaagcaaattcttcacctgaaaattatgacgtcccttcagtttcaaataatcaagtaaagaaaagacttagattcagtgatcaagtttatagcaatgatacacaacaaggtggtgatttctgggatcaagatgacggaagcggttccaatacggatgttgcagaagaaccatgggttagcgatgatgatagttcagtagtttttaataatcaatcattgaaaaggaggaagactatacgttttgaaagttcatcatccgagtctgaagaggaagatcagacatcaatcgttaaaaatgaagtgaaaagagaagttaaagaagaaactgaagctaaaaatgaaaatgaaagagaaatcgaaacagaagaagtagaaagggaaaacttagaagaaacattacaaaaagaggtacagcaagaatcaagacacaacgaaaaggagagcataacgaatgctgttcaagtaaatggtgtagatgtaaacggaacaagccagcctgatattttggcagaggaagaaacaacactggaggaagaagaagagcaggcgaatgaagaaactgatttaaatgaaaagattgaacatattcaaaaagagaacaaacaacaagttaatcaagttggaaactcaaacgtcagcaatgctgtatctattgtgaacaacaaggaacaagtgacgtacaatagcaatgagcgtattaatgaaactaagttaataaatgataagcaatcaaatgataaaaaagatgaagtaataaaagaaaatttacgtgttgatgaaaatataccatcacaactaatgtcacaagagattagttcaacatcaaaagagagtgaagaaagcaacgagaatgaaaacgaaaatgaaaaacgaaaatgcaaacgaaaatgcaaacgaaaatgcaaacgaaaatgcaaacgaaaatgaaaacgaaaatgaaatcgaaatgaaaacgaaaatgataatagtaatcatgaaaacaacgaaaacaacacacaacaagatgtagagttgatgaatcgtctaggaagaaaaagatttgagaatattgaatacaaattactaactgagttgagctatcttgattttagatatcaaccacaatatgttatcgttaagaatattgagattgtgacaggaatttcaaaattacatttatattattagtgagactgaaacaagatataagagaatcaaattacgaattaaggatgaaaataatgatacgttagtaatttatgttcaaaacgacgatttattgaaatttttacaaattgatgatagaaggatactccttttttgatgatattgaagacactattaaggagaagattaaaaataagtataaagatggaaaagaagaatattttggtatgattatttcagccaaagaagtctttcctaacattaggaaatggttttgggaatataagcagtgagcggaaaattgaggagtagacatactagattcatagaaaacatgttgaaaccaaatttccgaggcgaagagattacgtaatctgaagtgattgtgaaaattttaagtcctctcacgaaatattatcatatttaattttttggcggcacaacccccacagtctgcgaagagagaagcggaaagtgggtgggccctgcactagagacacgtgttaaggggagaaattttatttactggcagatattcccagtaaaggagatgatagcggaaaatagagggaaacgtatcggtttgaagtatcgcgcatttcccatttctgacgatttttttctattttctcatatttttcacatttcctattattttcaccagaatttcattgttttcgaatttgccactgagaatattaatattgttcgtggagacgattactcagttgatgaattgattaattgattgtgtattgcgctgttgacttcactttatccacatatttattgtactgccaaactattacacctcattgcaatcattcaaactaactttgctactttaaaataaagctgacattgaattttttatcaacttttccattaattagagctcatttttgttgacttttttattcagtatctagactgttcaattttttgttatttttttactaaaattgtaaacaatctaagaccaattataattcactattcaaacattacccatttttcataaaaatatcatattaatttcaatattgcatcatataattattatagaaaacttatcaaacttatagaataaaattaaaaaatgacatttaatcaacaaacagaatcgttcgaatatattaatagattgaataataattattcttttcaagatgttaatcaaaattttatgaataatgctaatattatcaataattcagatttaatttctcaacaacaatctcaaagtaggatgaatttaggctcagcgtcaaatggtaatttatcatcacaatttgcaagctctttaaatatttctccttttgactcacaatcaaatcaacaacaacagtatcttttacaattacaaattcaagaagctcaagctcaagttcaagcgcagcaagcacaacaagcacaatttcaaaataattcattatcacaacagaaaagagcttactctgttgcttatcctctttataatcaaccatttggaaatagtttgtccaataatgaaatgttttcaccttcacaattttcaaataatttaccaaatcaaattaatgattttaatttagcttcacataatacttccattggctctataaataatgatttattaaattctaattcaaaaactggtttgaagtagtcaaacaattcaagaagttccagaagacacatttcaatcacaattattacctttacaaaagcaacaacaacaacaacaacatttacaacaattacaactacaacaacaaattcaaagtaggaatccaagtatagctgataatacaaatattaataataatggtattactaatgtttctaatgttagtgctaatattgctaactctaattttaatttaccggtcgaactgcaaggtggcgtcaataatatatttaatagaagacctagttatgccgctgatgttcaagctaatcaaagaaacaatttagagagtaatttgatgcataataaaataaatttaaaacaatacgctttacaatataatcatttaaataataaaagaaatacaatttacgaaaatccaagaggcagtattgataaatctaccagctttaaccctcttaataatactagtcaagcaaagggtcaaaatatgcattcttttagctcaatttcatctcattcctcttcaaattcatcattgccactgagtggtaatcttgatagtatgaatattaatagaagtatttctgatcttgatacaatttatgttaaattagacgatggtttattattaaataaggcaacaaatactattatcacatctcctgaattgaaaagggaatttgaaaaatgctcgatttattttggtagttttgatattgcaatgaatgttgttgatcaattaaacaatttattaaattcatctccagttgataataataatgaattcttaaacaatacagagttaattatagtacaacatagaattaataaattgctggattttttgttagagcaaaatgaagatttaaaatcgtcaaatcatatgggtaataaaaattattcactaattttaaataagaatggtagattggatattatttctttccctaaaaattccaatttacaattaatgcaaaaagatttaataattattgaaggtgacaggggtaaagatttagttatggttttaaaaccaatcattgattttagatttgcattatttttcaattatttgaaaaagaaattacacttgaaaagtttagagtttggtactgatattaatcgtaacaataacaacaacaataataacaacagtagcaataataatgcaaatgataaaaatagaaattttaataagaataataatcaatcacaacaaaaatctattattaatgaggatgaaaatttcatcactctgccaaataaacaaattttaagatttgcgaaacctcatgaattaagtcaattaattctcaaatataatgatgaaattatggcatatagaatttgtcttaattattcagcttctcttaatttaaacttgattattaaaaatgttgaatttcaatttgataaaaagaaacttattatttactattattgtttacaacgtttagactttagaggtctgattaaagaattgttcaagatctataaaacaagaatttggttatgtgctattttaccattagaaaaaagttttagacctttattagattatgaattagaaaaacgcaatatcaaacttgataacgttgatgaattaatatcaccttatttaataaccaaattgaagtctaattcaagttcaatctcaactgatagtatgattgatccattaactattccaaactcaaataccaaatcaaattctgcaattgataatcttaccccaccttctacagcttcttcaaatgtcaacggaagtttaactgtttcatatagatcaaataccaatgtcgtaaatgataaatttccaatatctgatcaaatttatcaatttaatgaaatcaatgatccaatctatttccactgcaaaatcttttccaatttaataaagatgttttgttttgaaatatcaaataaagatttattctctgatcgttattggttcttggatgatgaatctacagcttaatcttttttttctatcaatagcctgtctttactttttttcagcttgttataaaatacaatacattacattacattataaaataaaccaaaattaaaacaaatatacatacatctctttactttacaaaaatcaattaatgatactttcctgaataaaatataactttcgttaacttcaactatatatcactgaatatttgttttcttttttttttcttttcttaactttactttacactactttcctttcctttactttacttacttccaccttacttaattcagttttacattacttttcttttctaccaacagtaagctgttattttttagctatttttattctttccgttagaattatatatcaaagctttttttctctataaaatataaaatatatatacatttcgattattattataaacagagttcaagtttttctagtatacaattaatcaatttaatctaatcagtctcttctgattacatagtcactgcaccattcattatcagcaacttgatctatcgtagctctcttgtttctctttgttaataatgatttgacaatttgtttagcaagtttataactttcactattttcattctttattgtataccaagtccaggaaatcattgcaattctatgagatggttttgaagtcctcgtatttgatttaattttttcatttggtaattgatcaaatggtaatctactttcaagaattgtatataatacaacacctaaagaccaacaatcattttgtttaccatcatatggcatacctaataataattcaggtgatacataatcctctgatccacatctagttgataacattggatcattaggatcaatttctttacttaatccgaaatctgataatacaacaattggtaaattactttttgtgtattcaataccatttaataataaatctaattgattatatttgagtaaaatattttccaatttaatgtcacgatgacatatatttttatgatgcatgtaatatattgctgaaacaatatttgaaaaaatacatgatattaaatgaattgacattgatgatctatgttctaatacaaatgagaataaatctcctcctttacaataatccatcgccataataattctatcgataggtttttgagaggattcattatcatcaatataatctgatcctaataattgaataatatttggatgtttaagagttttcaatatagttaattctctagttaatgaattttgaattcttaaccttaattcttctgaattttcagttgatttattaaaattaacatcagtaactttaattgcggttttggagtcatttgcaagataaactttactaaatgcaccagcaccaacttcataagatatattccaatgttgaattcttttactctcatctatactatacgttataaaatgtaatgaatgtactggcagttcttccttttcactagattcaggtatatcactagttttataatgtctttcaatatttattaaattttcatgtgtatcgattttatgaacgggtaatgaaactacacgatcaacgggtttaatatttgataaatgaggaggtttttgaaatgatctaagatgatgttgttgctgtgaaatgttttcaaatatattcatttgtaattgttgatcagaaatctcatttctatctcttatcttataatctgatataaatctctgattttgatttgagtattttttaccttcatcatttgttgtattattacctgttaatgataaattattagtttcaactaatatattcctccttgaatgtgattgctgtctagttttagggattctcaaagcagatgatgagttgtgatttgtattgggaattattggacttaacttgcccttatcttccaaattgataaaatccttcttccctgaagtttcttcaaccggactaccaaaaaaatacggcttttcccttctggtattataattattaggtgcaattggtgtaggtaagttctgtatatcatcatatcttgttgaattattgttattattgttactgttattgttattgcttacattagacatatgtaattccgaaaacgtcgtacctgtctgcattggcggagttttataatcatacaaagtcggactcaacacacttgatggctgttcaaatgtgaaattatcactatttacatcatcattgatatgcttgatatcactgttaatactgtcatctgtagtcattgatcctctagagttaatatatcggttcaattcatgttgatcatctatgttttgatccaaaagttgttcactcattcttactagcttaacatctatcagtccgataccctatatccagatgaaaagaaccctattcttcaaagaaattccccaagaaaagaccaagaaaagaccaagaaaataaactctaatatatacctggtaacagccattttctgcaattgctctcccacaacaagtaaaagtgtcgcaactaataataggaatacgcacagagtgaaaaataaatattgctagagattaagtagtaagttagtaagtaagttacaagtttaacatccttttgggcaggtagcaacgagttagttcacgtcacactgggtgtcctgttgaataatatcatggatgttgtagaacagtcaagaatgggggacagtaatttgaatacctcaatcagaaatgatcctcctcccatcccgcacataactgctaatatgattcctttgaatgtggttttagagagaatatcattagatgcctataataagataagagagtatttcaaatttatggaatcgggaacacaatctgatgttgaaaagaagagacaactgttagaattttagtttcaattagggaaaatttcctaagattatacgttatttctaaatggtccaaaaatcataaagagataagtaaattaattgatatatttgcatggttacgtgaacaaaatcaagcaattatcaatactataatgtcatttggtgctattaaatcatctcttataggagctaaattacctgaaccagatttaatgacatctttagaagttttattaacgggtagacctaacttaccaacttataattatttagatgaagaaaataatttatcaccagaatttgtattgaaaatattgaaaaatttgaatgttgaattatcaattaaaatgtcaagacaagaaataatacccaaccattttaaaaactattcaattaaagatggttgtatttattttaatataccaggtgaatattcatgttctttatcattattaagcgataatcatttccatttgattgattttaatttaggatttacattagattcaaattcaattataacttctaaaaaaccatcattaaatttaatagataagaaatcaatatttgcaattgaaaaattaggaaatcaaatattatctgaatctgatgatttgcaaaaattggataatttactgttcaactttgcagtcactagaaaaattcatctattacacaaacaattaattgaattacgtatgggaatttggagaggtcatttaacacatacgtataatcctgaattatcatcaatggttataacatattgggttcaaaggaaatatgcaaaaccttcaacgattcatattgaaaaatcaaaaaatgataatggtgatatagatatttcaattaaatggtttatggatggtgaattggttgaagatcatgatttttatttgataaattcattcataactgatgtaaatgatccaaattatgggaaaattgatcttattggtactataaaacatattattaaatatcatataaaatgatagttttgaaactaaaggaaaatttgataaaatctgttgaagatactgataaaatgattatattatctgaaaagtgtgataaacttacttttaaaatttcacaatttaaacaaattatattcaatatagacctattaagtggatcttgcttttttgagaatcctaccaatacaatgaatagaagctcttataaaattaacgtgggtaatagtttagattatattgaaattctaaaattgaaaatgtcaattcaagaatctgaattttcttccatgatgaatgcaacaagctggattaatttaaaatctgttagattgactaatgatgaaataccaaagctaaatattaattattctaatttgaaagataaaagtttagcaagtgttctatctacttttgaactgtataagaggaaagactggccaattggttggacattaattgtcggtcattttggatttcaatctaatgttcaaatatggtgtgctaaaattgaatctgttgaaggtcaatggattatcaaatggttcactaaaatataccttgatgaaataacagaatcatttgaagatattgcatctacaaataagcttgaaagtagtgattcaactgatgtagatgatattagtagtgatttgagtatcaaagttgaaaacagagttcataaacgaaaagatactgaaattgagaatattaattcaaagaaactttcatatgatgatttactaaaattaatcaagatatcaagttctaaattgatttccaatttaatcgttaaagaactgaaggatcaaggatgtcaattaaaggtcttgaactcaaatgatatactggttaaacagtttttaacatcaaatttttatattgatgatatagataatgcaacttcagataatgctattctattaataaagaataaatctctatttcatatacaaaatgcaaaagattctcttgttttattgatatcaattaaaaataatgaattaaatgcaaaaatatttggtaagttacttgatgataatagttttgaaaatgtacctgatataaaatacaaagatgataatcttacagctattgaatataattcaaaaactaaaatatttaaagtagaatcagatgttgatttatcaaatcagttccaatcatcaatgaataatgttattgattcaagaaatagtttgtttttcagtgggtttgatatagtaaatccagataatttaattttatcaaatattttatcatttttgaaaaaatttgcaagatcattaaatttaatcaaactagttagtaataatccatctttgaaaattatcaaagtattatctgacggtatacaattcaaatacggtgccgatgacagtgagaccattacattaaagatttccccaaatactgataaaaacattattattgaatttccagagaataatctacaaatacaatactctgattatttaaataaggtgatatctaatggtgatattaccaatctaactatcaaagaacttgtattatatttaacattgacattggagtattgcaaaaagattcaagatctctccaatagagttggaaatatgatggaacttttcaagaaacagaatgaactggttgatttggagagtaatcctgaattatttaagtatacaccaaattttggttatattccttatgttttcaaccttgataatttaagaatatcttactttaagatgatcaaaattgaaactatatcaactggtacgaaaaagaaagctaataaaataatcgatgatgttttcagatttcaacttcgtattgaacttcgtcataaactgaataaggtatccaaattatattccaaatatttcatttcattaggtgatattagaacaaacaccacggatgtaattacatcaactgaaacaattaattcaatttgtggaaccaacccaacctcattacataaattaacgcaaaatgttacttcattgctgaccaaatatttcagcggagaagattttccacaagatttattgaaacaggagactgatgcagctactggtaaaactgcatctaaaggtagtgttgtgtttttacaagatggaatctgctgtgattttgatagtatttcatatgtgttggaagatttacatacaaggttatattcattgatgtcaacaccataaattaaattttcatagaaaaaaaactatatagaaggtccctaaattatagaatatatgtaattattaaaacaaatttgtaactattactaattgtaaaactataactataatgattccagagataatgaatgtcaaatttaaaataactttaaattttgcgatattgaaaattgtttatttacatgaatattctttatctttaaactttggcataattacaacctttccaacaaccaacctatattgtatatacctactatgcgtggtgttgaagagatacccagagggcgaagtgctaatatatacttttcttcattgtatcaagcaaatccaactctgaatagtggaaaaacttctcaaaataatagaggaaatgaaagatcaggaacaccgaatgaagataatcataatggagattatgaagacaaacctaataaacgtaaaagagtcaattataatatacagcaaatacaagcggaacagtttcttacaggtaaaaccaaggctaaatcactgagtgaagaatttgaaagtgaatatgtagatttaaccaatggatcaggaaataataatatatcaatagctgaattacgaagggctacgagaagatttgatgaattaaatagagagaactataatgaaaatataaaaattgaaataccaaagaatgttacaggattagtggtgaaaagaaatacgacaccttctccagctgtgaaaaggtttataatatcgaagaaaacatggaataactatcttgacgaattgaacaaatcggacattaaactaataactacgggaagtgggccattagaagtgaaacctaatgcacttcaacttgaaaaattatgtacaatttgtggaggtgttagttatagttcatgtattaaatgtaaattaagggtgtgttcagttaaatgtcaacatattcatgatgaaactcgttgtacccatttttcataaaaagacagttaattaatgttatatattagatatagataaaatatgatttgaattaaacagttgtaaataaggtccaaacacctttaagataaccaataatttcatcaccacctaatttagaatcaccataaattctatcaacaaatgaaattggaacttctgcaatagtaaagtttaaagctctagctctaaccatcatttccatttggaaaacgtaacccttagatttagttgcttcaataattttagctaaaacatcttttttgtataatctgaaagaacctgttaaatcagagacatttggtcttaaaacaacagtagctaagaaattagcacctcttgaaataagttttctctttaaatcccaaccatagacaccaccattacctgcatatctagtaccggtaacaatatcgtaattaccttccttttgtttctttataaactcaggaattgcttcaggatgatgagagaaatctgcatccataataataacgaaattacccgttacaaatttcaaaccatgcatataagcagtaccaagacctaatttacctgcacgaggtctcaattgaatatgttctggaccatatactttaataagttgttttgcaacatcttgagtaccatctggggaagcatcatcaacaatgacaacttcccaatcaagtttattttccttgaaggtctttgcaattaaataagtaataattggaagattttccttttcattataagttggaagaataacggaatacttatcgccagccatggttgtctgttaaacaaatgaaataatataccaacatccttaaagcaaagagaccacgtcgtttcaatcattaaaatttaaacacgcacttcttcgtgacgagttgtatccactggatgcaagtttactccatctttttctgagcaagaactgggttaatatctacagtaaggaatacatatagaacaatggcggtagatagttacattaagaggatgtttggtgaaaaatcatcccagtttgcagatgctaaagtgcttttagtcggtgcaggtggtataggatgtgaattattgaaagatctcataatgatgaatattggtgaaattcatgtcttagatttagatacaattgatttgtctaatcttaatagacaattcttattcagacataaagatattaaacaatcaaaatcaaagactgcaattgcagctgttgagtttttcaactataaatcaaaattatatgcttatcatggtagtgtgttagataccaatttattcccactttcattctttaaacagtttaacattatttacaatgctttagataacttagaggctagattttacatgaatagaatgtgtctatatttgaatatcccattatatgaaagtggtacaacaggattaaaaggtcaagttcaacctatttatccatatctcacagaatgtttcagttgtgtccccaaggaaactcctaaaacttttcctgtttgtacaattagatctacaccttctaaacctgttcactgtataacatgggctaaagatttcttattttcacaacttttcagtaatgaagatactaatactcaagaaattgatgcatctgaatttactaatgaggaagaagctgaagcttcaaagaaggaagttaatgaattggctgatttaaagaaaattatagcaaacgaaggtgacaacgaaatagtcattaaaatttttgaaaaaatatttattgctgatattgaacgtttgctgaaaattgaagaactttggaaatctagggagaaaccttcatttgaaccaactaaagattatgatcatttcttcaaagatataaataaagaatatttaacaacttgtaaagatcaatcaacattagaagaaattcttaaaacttttgcatcatcattattaagattaactgaacgtttcaaaaataatgaaaatattgaatttgataaagatgatgaagatactttattttttgttatgtcagcatcaaatatcagatcattaatatttaatattccaacaaagaatgaatttgatgttaaacaaattgcaggtaacattatacctgcagttgcaacaactaatgcaataatggcaggattttctgctctttcaagtgtgaattattttcttgagaatgataatataaatagagttgctaaatctaaaatggttttcgattcttcatcaactgataaagttgttaattcatcaaaacttatcaaacctaatccatcgtgtagtgcatgctctatagttaaaggtataataacaattgatttatccttaacaacattaggacaattaagggataaacttattgaaaaatataactatggagatgatgtcgaaataatgacattagattcaagattattgtatgattttgatttagaggataatcttggagaaaaattaacaaattttataaatgatcaaacagttttattaattaatgattctgatgagaaatttgatttaattgagttatatgttttaaattcaccaaattctgagataatattgcctgaattaaatatacctttgaaaaagattaaacctagtgaaaatgaaaatgatgaaaatgacgatgatgataaacttttggttgataatgaaaagaacaacgatgataaagtaactgtttcacttgacgatgatgatgatttagttgaagaacaaccaccaatgaagaagaggaaaatttgagaatcatgataatcaaatcattatttgtataaaaaactactattgtataaacaaacttaatagattatagaaaatttaaaacttattaaactaaatactatattacaccaaattaattgacaattttacttataaaaatacactgaaccaaatgaaaaaaactcattgtttctttggagttttaggtttgaatttttctaaccaatttttcttttcctttgtatctgattttttaaagaatgaagaaactggtgatttcattggtatactatttaaattattattaattttaccattttcattactgtcaacttcttttttttcaaaacttgcataactattaccacccatagaatcttggggtgttgcagttttaggaagatgaaagtcatcattattatcagtaatactataattattatcactatcagattttaatactttataagatttgaattcctttgtatcaataactccaacatttgattcgcttgtatcttcagttttttcattattcattgatggctgaaatgaaaatgctaatgaatttgatgactttgttatattttcactattactttcggtatcaatatcagcttctgcatctatgaagtggtcttcctcacttttttgatcatcttgactttcttcgattgtagtattattattagtattattattagtattattatcaatctcatttactgaaaatgtttgagcaattggagttataggagttggagtttcatcattcatatattctggaattggagaaatacttttttcatcattattaggtggtaatcctaattctttagccagttgatcctcagatataacaactatactttccatattagtatcagtattatcggtattattaatattaattgatgaagaaattaaattacttcttgaggaaacaatggagcttgtaccactttgatttgatgtaattctacttaatgaggtttcatctttagtatttaataaattatctgtattaaataatgggattctgaccatttcagtatgtggagcttgtgataatgatttactatgaggtcttgatctatttgcctttggacttgaaaatgaagttgttggagcttcaaaatcagaataatctaatacgtttgttcgataatccaatggtgtaatcatatttttcagtggtgaattttcctttgaagatgatgtgaatggtaatatacctaaatcatccttagattccactaatactgatttcctctttgaagaacttccaattgataatgtatccatcgtatcatttatatcttgttcatttgaagggtttatctgtattattggtttctctattttttctttctttggttcctctttcctaacattttgatcattttgatcattttgaacattagttaatattttatgagaataagtaatcattgattcaattaccaaactattaataatataagcatcagggattcatatcatctttaggatgaaataatattgaaggttgaaaaattgaagctaaatttttagcaggcattcgattaaattctgactttaaattaaacattgcaagcatatctaataaataaaataatacacgcctttgaattggaggtaatttctcaaataatattgcaaattctttaagtaattgtttcctttgatgtataattaattttcttttcggtttatccttttttaaagcttcttttaaacttgccgagttttttgtatcattttctttaaaatattgtaatagttcattcttttcaatcagtaattgtctaaaagaatcatataagttaaatggaattaaaggttcatttaaagaacctaaatatcttcttaaaattgaggcagcatcatgaactgtataaccttcccaatcaattttagctccataatcaggaggagttgaaaatatcaattgtaattgtttaattctacgatttgaaccagctaatctgaaaattccttcaacttgtaatgcatttgctttaaataagaaccacacgatactataactaatggtactttaccataagtcacattaagttcttttgatgaactagtagtggggagtggtatattgtggttaatattattttgaatatctgaagagatataaatagtaccaaaagcatgttttgttgaagtttcaatatcacaaccaaaaatatttgaattgccaattgtatcttgatgtttttgttgtaagaaagaatctctatgagatcttaaatctttatgttttatattttgttgttcattaatgggtatagttgtattagatgatgaagaattagaatctaaaaattgggataaaggtctaaatgaatgtgatgatcttgatttaaatcccagtaaaggtcttgaaggtgttggtgatgatgataattttggaggtgtttgattattaaattgttgagattgcgaaggggtatgagattgagattgaggttgagaagaggggagtaactgagaagattgtgaatgagattttgaaggtgataagaaatttaaagatattgcattactatttttcctacttgaatttgatattttaattggagttggacttaatatgggagtagttgaatcatctatctctattttaggagcatcattggaagttatttatttgttgagatgaagtagtgataatattattgctattattagtagtagtagcagattgagaatttgaagaaggtgaagttgttgtatcgtgtttacctaaacttctaaaccaacctgagattggattcttagagggagactcgttactgggagaagtcatgtgtgctgcagatataaaataaagtatggaagagatatctaaaagaaaggcaatgtgcattaaaatagataatcaatatattataaaaatatcaaagcttgtattacacgaacagaaacacgaattatttataagtttttaaattaaattttgcattacgtaatcaggtatattacgtaataaatatagataatatagaatatttattacgtatggtgtacagattattactatgttgtattacgtaatgataagttatctaatagttcgtcgcgtctatattgtcttactgggttttacataatcagaatattaatattaatatcatgtatttaaattattatgagaattagaatgcaattaatgcaggaggctgatcattaattaattaattgaattatattaattctttatactctctcttacattaacacaaacataaacaacccacaagatgagttttaaaggtttccaaaaggcaattgtacgtgcccctcaaaactttcgtcagaaactgaatatgggtacagttactgaagatgccgtttatactgatgctgaacgtagatttaaagaattagaaagtgaaacaaagagattatctgatgaatcaaagagatatcataaagctgttaatgatatgttagatcatcaattagggttttcaaaggcaattgaagaaatttataaaccaatttctggtagaatgtctgatccaaattcctcaatacctgaaggtaatcctgaaggtattgaagcttgtgaacaatatcgtgatgttgttaatgaattaaaggaaactttaaaacctgatttagaattaattgaatcaagaattgttgaacctgctcaagaattattaaaaattattcaatcaattagaaaaatgtcagttaaaagacatcataaacaactggatttagatagacatcaaaattctctttcaaaatatcaaaataaaaaggaaagaaatgctaaagatgaagaaaaagtttataaatatgaaaatgatgttgcaattgctcaacaagaatttgattattataatgaaatgatgaaaactgagttaccaatattatttcaacttgaagctgaaatggttaaacctttatttatttctctttattatatgcaattaaatgttttctatactttagcttcaagaatggaagaaatgaaaataccttattttgatttatcttcagatattgttgaagctttccatgcaaagagaggtgatattgaggaaagagctgatgcaattggaattactaattttaaactgggtcatgcaaaggcaaaacttgattatacaagaagaagatttgaaatgcaaaatgctggaaatactccaggtagtccttatgatagtgcaactccaacttattcaccaccttcatatggtggaccacctgcaagtactgctgcatatactccaacaactgcaacttcttatggttctgcttataccccaccaacaactgcaactacaggttatggagatggttatggtgttaatactagtataaatgaaaaggaaggagggtatcctggttatggagctacttcagctgctgctcctccatacggtgcagctccagcttatggaaatactccattagctaacgttgcaccagtaccatctgcaccaccagcagttgcgcctgctgcggcctcggaaacttgtacagcattgtatgattacacggctcaagcagctggtgatttaacattccgtgcaggtgatcaaattacaattgttcaacgtacagctgatcaaaatggttggtggactggggaacttaatggtcttcgcggtgtattccctggtaactatgtaaatcttaactgattaactactcctaagtttataatattatgtatgtttagtaagtaaaaaaaactaataatgtcacgatattttgcagagtttatagatttaacaaattcaaagagagatgatgaaaatttcattgtaactatcaaattgtttaataatacattacctaaaacaacaaataatatttcaaaattattctataatcctaatgtaaaggaacctacatataggaaatcaaaagtgactagagttatagcacctgaatatttagtacaatttggtgatattgtacgacgtcatgttaatgataataatttaaaaataattgataacgaagaatgtgaatcagaattaccaaaatttaataaaaagataataggaagacatggaattgtcattgcagctgataaattagatgataataatgaaattacaacacagttatgtattttatttgtaccatggggtgaatatgatgaattaagtggttatataccaattggtgaatgtaaagaatggaaaaaattgagtgaatggatgggaaaaattaaagttgattcaattaattatgaaattccacaagataaaggtgtttggattagaagatgtggtagattacgtagtaaatgaaaaggtatattacaataagtataactaaatgtcttgtcgaaaatgaccgaaagagtcagagcttagctcatcaaacggagatacacgactagtagagaaaaattattatttcaacacacacgtaccggggagaaaaccccatgacgatgaacattcgaacataaacagttagttcccattgaatggggttcatgtgacgtccatgttgtcgatgcttaaaagaagaagataatgatagtgtacaatattgaagatttctcaactaatactgctactgaaaaaatttgttaatcgcgtagtaaaaagggtaacgaagagggtatattaggactctttgttttattcattaaagtagtagacatgcatataaaaaagtatagaaaacaattatatcttctgtattcaaattatataaataagtgagatgagttaaacctaacatcatgcatacatcacaatgattatataattggaattaatttcaatacctttggcaacatcaattattaactaattcattaactccataagttatatctttttacctgttgatttataaataactccaactggggtataaagctgttcaattaatccaaaacctatcataaaatgtaatacccactcaataccaataccacgaaacttaaaaatacataatggtggagtatcctttttcattggtttcatccataatgaagctagtgatttatatgaattaactctttttttgatttgtcctaatacccaattaatagctttatgtaatattcgtaataatgcacctaaatgaggtaaggataaagtttctgcaatagtcaaaaatcctttctctactaaagttgatggggcttcgccatttttattcaatatatatgacatttcatctgatgttaattcattaccatatgtagctttaaacgtatcttgtggtataagtatttcaatatcagagtttgatattgtggctggaatggaaatgaggatattatttagtaataaagtttcaatttcagcatcacatcttgatatattatcttcaaaggcagcatatagatgttcctttgtacatatgtgaggatacttggctactatacgtgctgatcgtgaagcagaacgaaagtgtgggaacagggtacgagtctctttgataatttggtccactatctccgacatagttagataaaaaaaggaccaccacagtgttggtaaattgctcaatgtgtagattattttaattattaatcaatcttcattttttcttttctcaatgacaaatcattatcaatttgacgtttcaatgtcctgtagtggatgttcaggtgcagtggaaagagctttatctaaattagaaggtgttacatcagttaaaactgatttaaaatcacaaactgttgatgttgaaactaccccggatgttgaattcgaaacagtgcaagcgaaaattgcaaagactggtaaaaccattaacggtggtagaactttataatgattaatgatataaacttttcagttgtgtatagttctttattttatatagtatttaatagactgaatctctaatgggccaacatatactggaagaccctttattgtcacttgtttgtggaggtgccgctggtgcattatctcgtactgcagtttcaccatttgagagagtgaaagttttatttcaagtacagggtaaatcaggatataataatggtactatggctacagtggtgcagctttataaggaagaagggtggagaggtatgtttagaggtaatggtgttaattgtgtacgtattgtaccatatactgcaattcaatatgcagtttatgaaagaattaaacttttcgttggtggtgaaatgactccattagttaaagttggtgctggtcttatagcaggtacagcatcggttttaggtacatatccattagatcttgttaagacacgtttaagtgttttaactgctcaaaaacttgatattaaaaatatgaaagcttcattaacattacatggaactttaatgaatatttatcataatgaaggtggaatattggcactctatagaggtatagtaccaacagtacttggagttgcaccatacgttgctattaattttgcattatttgaatatttatcagaaagagttcaagaaaatacaaataaaaaaccttcaactttagttgttcttttattaggtgcattttcaggaggagtggcacaaactatggcatatccgtttgatatgttacgtcgtaggtttcaaatagctacaataccgtcatcaccattcaaatataagagtacaattgatgcattacaacagattgtacgacgcgacggcttgaagggcctttacagaggttggggggcgaatatgtggaaaattatgccttcaatggcagttcaatgggcttcttatgattttcttaagaaagtgttataatgaatatagtgtaataataataattaaagtaaatagaattctgtaaaaataatagaaatatgacaatggatatttcatttgaagatacaacattaagggatgaattattgacaaaattacttactttgagagagagtaatcgtcaatataaggagaaattatgggaaagcgtatctgcactgagtgatgtgtcatcaaatgctaaagaagcaccacagagtgttagttatgaggaatctcttacaaatgaacaattgaaaattcttttacatgaatcaagaaaatataatagtaaattaatggaaacaattgaagaatatgaggattcattacaatttatacttaacgcactggtagaggcaaatacatcagcaactacgagtgtaattgactcaatagatgtgaaggataattcatcagagcaagaaatgtgggattcatggttcgatctggttgatgttttgaatggaatcatgaagccctcgtctcatgatattgattgaacttgcagattaaatttttttcgtgttttcttaacattgattgttttcttttccaattaacaaacacgttaaaatataacaaaatggaagaaacaacatacgcacctccaacagtaccaaatccaccaccattacatacatatactgattattccccaattccatcatctatacttaattcagagaaaccaacaactattgttttcggaattgatgaagcaggtcgtggtccaattattggtccaatggtttatgcactagcttattgtacactggaatttgcaatggaagaactgcccaatcttgaatttgcagactccaaacaattaacagaaccaaagagatgggaactaatgaaagatattgttgaaaaggaggaaatacaaataggttatgcagttacatctctttcacctaatgatatatcagtatctatgttaagatcttcaaatgtgattaatcttaatgaacaagcacatagtgcaacaattgatttaataagaactgtaatggagaaaataagagcagttaatccagaaacaaaatttgatgctgtttatattgatacagttggaccacctgcttcatatactactaaactgagaaaattctttacagttgaacaaataaataagattgttgttgaaaagaaagctgatgatacatatccaattgtatcagcagcaagtgtggttgctaaagttacaagagattggtcagttaaatgttcagctgaaataattggagctacatgggggtcaggttatccatcagatcctaaaaccaaggcatatatcaattctaatattcatccatggtatggatgggatgaaaatattcgatattcatggggtacagctaagactgcattggagaatagtaatgcaattaatatgagatgggagcatgaacttgttaaaaagcatggatttgatgatgtcgttggaatgttcaataaaacagacaacaacgaaattactaaaaattggtttgtacagtaaatgtattattataatttataataatttatattatatagaaattagacaatgtataattaattaatttgcaatatttgtcattggttcttcttcatattcgacttcgattctagctctctttgtctttatcttctttggtttaacttcaggttcttcatcatcatcgtcatcatcactatcactttcatcatcactatctttacctaaccatttttctaaatcttccatatctaccatttcatcttcttcgtcttcatcagcttcaacatattcaatttcaccagaaccttcatcatcactatctaattgaacatcttcatcagaatcaaattcttcttcatcttctaattcattttcttgatcttcatcttccattttacccaatacttttttccatattttatcatcaacatttaatggtttatcaccataagcaccactctttaatctatctaaaagttccttttcaattgatttttcgattctagcagctgctaatgcttttctttctcttttttcttctctctttttaactttatgtttaacaccaacataatttctttcactaacttcacctctttcctctcttaatgccatcctacgttcagtaatttgaacttgttttaatcttgtaaatctttgtttacatttattaatattaaaatcattccaatagagtaaattttcatcaatttgctttaaagcttttgtaaaatcttttgataattttatcctttgccataaattttttggtgtatgtgaacgttcgacagttttcatataaagatacaatttaccatcaacttgtttaactgttgcatattgagcatttgctaatggacatgatctacgatcacataaacctgtaacattatattcatttctacagaaatcttgattattttgtgattgatgcgggcgaatttggaatgaacagaattgtttactaataactttccaaattaaatcgtcagacattgtatagtttatttaatgacggtggtgattgtataatgtaaagctggtataaattggtatataaaatggtataaataaattaaaaataaaatatgttaaataattatatttttttttcatgaaaataatttttgtgaaatgaaaaattttttatcactgtattaaatactgtaagagaggattttactttttttttagtattcgcgcttctcttattggcgtttcttttcctttcttttaaagaacgacaattttaaactctgatagtgttgattgagccttctctccaaggtatctctcaactttaataggtttaattgtatcccagtcaccgtatgcaccacttttatcaacaagtgcatccagtgtttccttcttactccatccttgctcttttgcaacttccggtaagaaagttgcagaacatcgacgatttccatatttgaaaataacatgtaatccatgttcaccaatattccaatttaatggattattagttatatcttcaaatgaatgtaatattgttacagcacattgtaaatctaaatttggagaactttcaatttttaaaatttcatcaagtgttattggtttaaacctttcatcttcaaatgctgatattaatgcatattctttaactgattttggtaatggtaatttactaaaatttccaatacatccacgtaatttttttgattttgtttccttattaattatattccaagtaacaaataatggtgcttcaaatgatgttataacataatcacatgcagtggcaatttcaaattctggtaaacttacctttgaataactcggatcaattgagttaagtaatgaatgaattgctaaattggcataaaaataaactgcatccggtgttactgacattgttaatgtaatgtctaatgaactgtattgatttagcggaaatataaaaagaaggagatgcatgatctttaatggggggcgtggtttactatgtagaaatattattagattttttatataacgatctgggtctccatcttcttaaaagtttggtaatcaagtttattaaccatatagaatgaacattgtttcaaatattacaaagaatgaaagttccaaacttgcagtatttgcagctggatgcttttggggggttgaacatatgtttcttaaacatttccaaatacctgaacaaataattgatgttcgtgttggttatgcaaatggtaaatcaaatattacaaatccaacttataaacaagtttgtacaggtgaaactgattttgcagaagcagttttaatttcatataatccatcaaagattacatatgaacaattgactgattttttctttagaattcatgatccaacaactgttaatgcacaaggacctgatattggtactcaatatagaagtggtatttacactacaagtgaagatgatgttaaaactgcacaatccgttttaaataaattctccaaatggtatgcaccatccaacgtagtaactacaattgaaccattacaatcattctacgatgcagagacatatcaccaacgttacctcattaacaacaccaacggttacacttgtccaacccattacctaagagacgcaccaaaataattttactttttccactgttaacttaactgatctttgttcttgttttattttatactatactattgtataactaactgtacatagactacatctaatcaatggacgaatacgatagttacagtgacaatgatattcataatgcaggatttcatgaagatgatctctccgatgatgaatatgatttactatatgatgtattaccaacttttaaaaaacttgcattggataaacaatattctgtatctgatgaccttctcaaagaatacctttgggaagctcattatgatattgatgaagcattactcattctttcagagaatcataaacgtacgtataataatgactaacttattaaggctgaagcttgaactcttggagcttataacgcgagtgagagactttttctcatgtttcttctattagtgtcatcttggattctaaagaggaaactacagataaatgtctaaactacagctgttagcagagaagagacgacagcaaaaagaggcgaatgttgcagataatgagagatctggtttagataaactacttcaaaaagaggaaattagttgctcaacctttattgaattcagaaactaagaaaagagttacagaaccaataggtggtaaactaaataaagtagtacaaccatcactatcactacaacaaacgctagtaaagaaagatgacccattaatagaattctcattcccaacgccgtctttactaccaacaactactaaacgtttacaacaaccaactcatatactcccctcaattatttttgcaaataacaacgccctctctaaatctgtaattgacattaatactaacatacccactaatatagccgttaaaattaaagaaaattttcaaaagaaaagtcctgatgataatagaaaaatagttaatacattatctgaaaaaattcaaaatgtggaattaaaacaagaaaaggaagaatcaagatcttcatcaacaataaagaaaccaacaaaagctaaaaataaaattgatttaaatgaagaaattactttaaaatcttcaaagcctttattatcagctattgtaattggtcatgttgatagtggtaaatcaacaactattggtagattattatatgatttaggtatagttgattcaagatctttacataaacttacaaaagatgccgagcttgcaggtaaaggatcattttcacttgcttggattatggaccaaactcccgaggaaagatctcgtggtgttacaatcgatattgttcaaacacaatttgaaacttcaaatatgagattcgcaattattgattctcctggtcatagagattatattcctcaaatgattaatggtataactcaagctgatgttgcaattgttataattgattcaacttctgatcttatctttgaagctagtagtgccgttggtaaaaatggtaatttctcagtacgagatattgctaaaggtcaaacttttgaacagttgaaaattgctaaaaatttaggtatagagaatgttcttttagtaattaataaaatggatgttaatgattgggatgaagatagatttatttcaattgaaaatgttttaaaagatcatttaactaatgaattaggatttcaattacaaaatttaaattgcttacctgcatcaggttttaatggtgataatattttcaataaatcaaaattatgtccatggtataatggtccaactctatttcagtatatggaaataatgaacactcaaacaaatgaaaattctcatattacattatcaaatcaatcaaaggatcaatttgtacttacagttactgatcttacattaggttcaggaattgaatctgggtcaattgtaagtactagtaaaaaatcagatacggtaacaattcatggtcgtgttaattcaggttatttacaacctggtgaatctgttaatttctggccatcaaacgaattaggtcaagttgatacaatttcaactgtaattactaaagtaaataattcaaaggacaataataataaagttgctgaaaaagttgctattcctggtgaatttgttgaaatgaaaatacgtaaagttgaattaattgatgcattagctattggtgatttagttactaaaattacaaaagctgatgatgatttcgttaaatgttcaaatcaattaggttgtgaattatctatgttttcactaaacagaccaattttaataggtacaccatttattctattcaaaggtaatgtttcatattctgctaaattatctgcaattgaatgggtagagaataaaattgaaaatgatgatggttcaattactctaaagaaaactaaaaaacgtaaacatttaagttcaaatcaacgtgctagagtcataattgaaactgaaaaattggtacctattacagaatcaattgttaaattaaatagaattgttatacgtaaagaaggtttgacagttgctgctggattaattaaaaaaacaatcatttcatagtatataatctattataagtaaaattaatcctgccataaatatcatatatgcaaaggttttattacgtttactactattttcgttcgccttttttaagacaatattaccacttttgacattaccaacaatctcatccttcgtagaatccaatatagaaatattttcattttgtaatgctaattgaactccaatttctctaaccatactagcaacatccatcattgatgattcaatttgtgtaactgcattcaaactttcacgtttcatttcttcaattaatgaatgttgttcttcctgtaattgttgaagttcttgcggaataatctcttgttctaattctttaaaatcttcagaaactacctttttactatttcccaattcatatgaattatatgtagtacttaatgtagattttttcaattgtgataatctctctactcttttatcatgcatttcattccattcctcaagatcaacatgtaatttcaaccctaatgatttaacaacatttgaaaaaattgttcgtaatgtttcgttctttacactaatatattctgcataatcacccattgagataagattacgtgttaatgattgaatcgcattagaattattatcaatattggtaaaccctacgttatccaacatcgccgttagttcatctgaatcagcagacaatttctgtagttttgtttccacatcttgtaaattcttgatttgattagtgattctctgtaacttcaatctaatctctgtatcaaaaatcatcttttgatcttctgacatttctttagagttggtaagtaaatattgaggtcgaatatcttttattaattgatgcattgttgttaaagttaagtatagtgatcttgttttagtataaatttctgaatcagctaatctataacctttctctttctttttatgtacaatttccatctttcccaaagactcggaatatatctgtacgcattgctgaaagaatattgtcctgtccatgatctccttgccaatttgcagaaagaaaaaagagatcatgcatattctgtgaagtaattctgaaaactgttaatttgaaatattatttaagtgtgcgcctctgcctttaaaattaaacaattacaacttcaccttctttctattactttatcttaacacaatggattcagatatgatgagtagcagtgtttgggacgataatgtccctcaagaattaagctttagctacaatgactttagtagaggtggtgatcaaccttggggagcagatagtttatcaaaaaatgataatgatgatgataatgataatgatatcgatgagttcaagatccaaaatgaacttgcacatactatgaactcaatttttctggacaataaaacagatgagaaagaagatgatgatgaagacgaagaacatgagcatcgtgctaatggagaatatcaagatggtagtggggttgatgatgttcatgggaacagtaatcattcagagcatgtgcattacaacgatactcataggaagtctgatgttggtaacccatttttagcaggttctgaatctggtaatgataatgatcatattgatattcaaatgttaaaggagaaaaagaatcaattgttaaattcacttacaagtggtgataatgctgaaaaatcatttttgaaggactctaatgatgatctggataaatcagtgaacgaacttttcttaaaatctccacaaaaatcaagtggaaactctcaattggataatctcttatctgaacatgaatctgcacctgcatctgaaactgaaaccgaaactaagaaaaaggatgaacacggagaaactgcagagaaagagaaggagaaagaaaacgaagaagaaaaagaaaaggagaaaaaattgttgtcaccaattagaaaagttaatgtcataagaccaagaagagttatgaaacataatctacattcatcagaaccttcaagtgcagcagtagttgctagtgcttctcctcttgaagatccgctatctgcgcctgcacttccagatgatagaaatgatagctcactgaatagattatcatctccaactacaaggaaacaaaaattcatcaatgaagcagaagctcctcttttcgagataaaaagaacaaatctgaatgtaaatgaaactaccgttgatcattcattgaatattgatgcaaattacaaacctaaagatgaaaaagttgaagattttgatataatggtaggagatccactgaaagttggtgaattaacaaatgcgcatgttgtttatacaattaccacaaacacaaagtccactttaatgactcatgaaactacagttgttactagaagatataacgactttttatggctttaccaccaattactgaataatcatcctggttatataattccgccacctccagagaaacaagtttatggacgttttgatgataaatttattgaaagtagaagactagcactggaaaacatgttaaagaaaatatctaagagaagtgtttttcaaaatgatttagatttcatacttttcctacaatctgaaaatttttctgacgaatcaaagcaaaaggaagcaattgtatatcatgatgatgaaaataaaattcaatcagaaaactctgatgatttaattaatggaccaatgaatacaatggcacaaatattgaatgcaactgcaagtcttggaattaatgatggtgcatccagtggtgggtttttcagttctttaataggtttaaatgttcctaaatatgttgaaactgataattatattctggaaaaacaatcatacatcgatagtcttgatgagcaattacgtcaattaactcaagttcttgatatgattctggaaaaacgtgaggaactatcactgtcattaaatgatgtatcaacggtattgttacaactgtcagatcttgaagtaaatagtgaaataactgaaattttaagttactttgaggaattacaagtgaaaattaaagaattattagagagaggaaatttatcacaaatctttacctttggtgcaacagtggatgaatatattttactgattggttcaattcgtaattgttttgaaaatcgattgaaagtttgtaatagtgttgcaacattacagaaacataaagaaaagaaagaacataatttagccaagttcaaagcaaaaaatcaaaatcaaaccgataaaatacatttttacgaagaagagttgaaaaagcttaatgatgtggtaggaaagcaaataaaacttaaggataattttgagaaaattttcaaggatgagttatcaagatttgagtttgataagataaaagatttcaaaaatatgattgagatttattgggaaagtttgattgaaaatcaaaagattttgattgaattatgggaatcattttatgaaaagtgtaaatttgattaaattattcaaaaaaagaaaacattgtataattacataacttatgaaatataggaatattaaaaaatgcaaaacttttatataaaatgtaaatatagtaattattaacgtacttgagaaaaatttcacaattgtaaaaagaagtattttatgcaagtaaaatttcccaaccccattctttcatcactgttgtccaatgagtccagctaccaaaaacattagattcatcatcaagaatttcatcatcttcaccatttaaaacaatacttattcttcgtttaacttttttataatcatttgacgggtgattttcttgatttaaagtatcaatattaccatcaacatcacgatttttaccatgaaaagcatcctttcttgcccaaacttctttaacaacttcccaagctctttcaagtgtaccaatccacattttatcaattaattcggtccatctgtcctttgcccaatctctttcctctcctggtaatgcttcacatgaggcaacaaataatgggaacatatgagtaacaagagttcttgaagtacttggaatactagctaacaacatcataacattctctgctaaactatgagatgttggacttggaatctcaggtacaatttgatgtaaatataataaagttgaatgtctataagcttcagcagttgcaactgctgcatttaaatcaaaagatggatcctctgtttgattttgatgttttaattttgataaacttggtaatttccaatgttcaattgctgattttaaatcaactgctttcgaaattaatctaagtggtgttttaacttgtgttttacttgataatgaattaactgttttataatgacgaatttgtgcaattaatgttgcaacttcacccattattggaaataatgtttgagcaactcctaataatgggtcaataacatcaccatcttctagatcgaaacttctatatttggcaataacagctgcactgtttgtttcattctttggtttctttggctttgccttacgtttatttgaattagttcctgaaaaactatgagcttttcttttcaatggaacactattaatttctctattaaaattgaaatccaaacttccaccaccatttattattgatgattgaactgaatagttttgatcctcatcaattacttcatcattttcaatatctgaatttctttcatatccattatcatcattatcatcatttaattcaccttcctcacattcacttgtcattctagcaagaacatcaaaatacatccatgcattaactaaaaatgccaattcttttggtaatttctttttcttcaaatcattcagtttcatcttcaacaattggattcaactgattatcagatggtatatcagacaagaaactattaatgctactcatactattggtactatcagttctctttctttttcttttatgttttttctttccttctaatttatgaagaactctaataatcatacttttagcaccttttaaatgtgcaattcctgtactgatatgtctatcccatgcttcacccatagctaatgcgatacatgtagctaatgcaacatcgggtggtatttttttagtcatctctttagatggtgaatttgatggtgataattctacaattttattattattggtatttgtagtcaacaaattatcttgtcttctaattggattatttacattcccacttaaaccatgaactaatgaaacaattgcatctttcatatatttaacacctctatctcttaaacttgaatcacctctagctacatggaagcaagtcattgctaacaaggcacttctaactactggatgatcttgtgacattggtaaaagaaaagttctccaaggattttcagttggaccatttttaattgacataattccacaagtatgttgatcaaatgcaatcagagtcgatagatgttcatcaggtaaatgtaatgaataaatgtttattggttgttgtggtaaaatggtttgtgaagtatttttatgttctatgatgtctaaagttgagcttatatcagaggtaattgatctaggagaacttacagctgaatcaaaatctgttcttttattatttgaatattgatcatcaatagctaaatttttatcatctttatctaattcctgctcttgtttatttgcattattttcttgtccagcaccttcttctaattcatttttatttaagttttgtttattatttgcaaattcaactaatgatctaaaaggtgattgcggtatatttaatgatattccctcttggggtattaggatccattggtgatgcttgatttaaaaaatttgacattgataaatcattattaccaaaattattttgagaaaatcccattgcaggtgaaaatggactaaatggtaatgaagatttataaaacattgtatttgaatcaaaattacttgataaattttcattaaccaatggagataattttgcataggggaaattagaatcaagttcctctattttaggtgtttgacctatttgatgaatattgatattattattagtatcagggtttaaaatatcataattttgatttagcatgctataatttggagattttgcatgtagttgttgaatatatgagaaattagatgattctttgaaaaggtttaaaggtgaatcatttggaagtgtattggatttagaaaatacttcaatatttgatgactttctttctgattttgtaggtttatttgagaatccagataaaaacatttcagtaaatggtgaaggaggtgttgaattattatttggacttgcaattgctatatctgccagagaatgaagtggggaattaattggttcatttttaatgttttgattaattttcaatttatttggttggatattgttggtttggttattgttagtttggatattgttagtttggatatttgaggttatatttgaatcaatttgattattctgttgttttttatttgaagaatcgggttgtttattagaagtattatcattattattctttggaacattttgtgatttactattcagtaattgtaaaatttcttcatttgtatttaaatttgataaagttgaaacaatcgcagaagctaaatcgggatttttaccttgagatataagtaaatttgcaattgcaacttcttcagttgatctaccagtaactgataaagttgcttcctctaatgctttcttaaggaaattttgttttgattttgtttcattttgtaatctcttaatttcatcaaaagtttgagcattttccttaaaagtatttgaacttttgatattatcagtagtaatagaaggggtattatttaattttgatgacgtgtttgaaatttgattaattttttgacctgtggaatttttattatttgaaatgataatattgctcgtattattaatttgattttgaatatttacagttttattagaggatgtagatgtggctgttgttgttgtggctgttgaatttgattgatctgaaaaatctttccatttaaaattaattgcatatccaccacatacaatacctcttttaatacaattattgcaataaggtttactttcatcacattttaaccttcttttcttacaagtgacacaaccatttcttgattttgtatttcttgtctttggtttagttccattatttacttcaaccatggttatttgatattatataacaagatgaaacaagataagataagataagataagattatgagattagtatgtatgtatggaaaacaaagttaagtgaagttaaactatattaagacaagataatagatagataaatagtaaatgtataatatctctttcagagaatatagaaaggccaatcgggggtcagaaaaagcaagcggaatgagcttgcagagttaaagatataacaatgattcatcatcacattgtcatcactatcggcatatcgatacttactatctcgtatactatataattttaatgcccttatcgttatcggtgattgaaaagtgaaaaatcttatcttatcagtggaaaaagtagacgcgtctgtgcagatattgtcccttaaaatggaaatagtttcctattcgggtatggttttccgtagataagataaattatcattctttggtattttattcgtattcgtatttttatcctaagttcgtttcattattactgtactatgattatatttaattataaatactcagatactaatataaagcttagtagtatcctccctgtaagttgccaagaaaggctagggcgtctatagtctttatataaatttaactgccttacgtaagtatcattatgtaaacactccctccacctgtgtattacctaatagaggtatataccatgatatcaatattttcccccactaaaattaaccgttacttaccaatagtaaatgtcggctaaactcatcttatagttagaggtttatcgtagagtcaagattatataagattttggattatcaactgaaaaactatttaagtataatgtattataaccatttcttttcggaattctctgcttcttattcttactttctgtaaataaagcaaaaatgtcattcccatattcattaactccattagctgataaggaaactttattaaaacaatttaagggtaaatcaaaatctgaattaccaacacctggtttagttgttgatcgtaaaattttcattgaaaattgtgaaaaaatgctgaagagtgcttcaaatcttgattttgaatttcgtgctcatgttaaaactcataaaactttagaaggtacaattttacaattaggttcaaataatttaaaaactgataaaattgttgtttcaactttaatggaagcttggaatttaattcctttagttgaaaaaaagtttaattaatgatgttttatttagtttaccctgttgttaaaagtaaattacctgaattaagtgaattatcattaaaaattccaaatttaagattaatgcttgataattatcaacaaattaatacattaattgaatttagtaaattaaataatattactaaaaaatggtcaattttcgttaaggttaatatgggtacaaatagagcaggtttgaaaaatgatgatgaatgaactaggatttaatcattaattctttattaaagaatgaagaaaatgctaaatatgtttcattatttggattttattgtcatgcaggtcatgcatattcttcatgtaattgttctgatgcagaaaatttcttaattgatgaaattaattaatggtaatattgcttgtaaaaaggcaattgcaattaatccaaatttaaatttaacaatttcagttggttcaactccaactgctcatgcagcagaatttttaaaattaaataaattatcaaatgatgaaaaaattgttggtaaaattgaattacatgcaggtaattatccattttgtgatttacaacaaattagtacaaattgtgttaaaattgaaaatgtttcatgtagagttttagcagatgttttatcactttatccaaatagaggtgataaaaaacctggtgaagaattaattaatgcaggtgtaattgcattagctagagaatttggtccattacctggtcatggtagaatttattcaccgaaaggttatgaaaattggattgttggtagattaagtcaagaacatggtattttaactccattaaatgaaaatgaaggatacaaaattaattccaattgatacaagagttgaaattgtacctcaacatagttgtataactgctgcttcttatccttggtattatattgttgatggtgatgatattcgttgttgatatttgggttccatttagaggttggtaatattatatactttatataataatatactgtataccttacattaattaattgacattataatattttagaacatttactttagatctgtacttttcaaactgataaggaaaaatcatacttgaaaatttattaaaactttttgtaaatatttattatcctacttactactatatatagagatacatgcatataaaatctaatctaaagttgcaacagcttcaagttcatatttaattgcagcatccataaatgcaacaacaacacatgaacgagctggcttttgtgggaaatattgtccataaactttattaacaactgaagaataatttgcatgagatatgaacattgtaactttgaaaactttatcaagtgatgaaccacctgcaactaaaactttttctaaatttttaattgctaaatgaacttgttcttcaacatcatcaggagtttcaccagttgcataatttgatccaattatacctgatgtgaaaacatgtccattactaacaaaagctggtgataaagttggatgttcaacaccttgaattgaagtcccatgttactttagttgctggcatttttatttgatattatacttaagagaaatcctgtttcttgtgttaccaagcaggttcaatagaatatagtcaattgttggaaataattgttccttttataacccattttaactacttgatgtattattagtgggggactgaatttcttatcagtagattagtggggggagtaaatctgagatataaccaatagtatctaaggggggggtatttcctattcatgtagtatcttcagtatctcttgaagctagtaatgtatttccattgcaagaaacttagtagaaggtattggtgtattaataagagtagagtatatatatatccattcatgtagccagtaaatcccttacgtcacaattagtcttaatctcagaaaagcaaagcaaagcaaagtaaagcgtgtttactttttgtattattttattatgcattaatatgcatgttttcttttaccactgtggggagtgactgtcttgttatagaatttacagttgtgaattatataatataagtatacatggctaatagagagacttcacgacttgcacctgatcctaattcttcaggtatgacattctctaattatcattcagatccaaatgtactctctatacctaattccaattctaggaataggaagggatagtaatatcacttcaacttcaatatcaacttcaataaatcatgaaggttatgaagttttcatatttgaaaattatctttgttatagttttatttattatttcaatgattacttttgtatctcaaactgaacttacaagtttacttttcactaattatggttttgatgaaccaatcttattactttatctaaatcatggttcttggtgggtactttgggttgtacaatttgtttcaattgctctattaaaatcttttaaaagatatttgaatcatattaaaggttatgatgaacttaatggtaaacgttggaaaggttttagaaaagcttttgcaagttctgttaaagcacaacatcaaaatatttttccatacctgctgaactaacaactaaggcaaataattcaaattatcaaattatatacaatgattcaactaaaagtttcaaaaattattcaactttctttaaaagtgaagctttactttatatgattaaaatgtcagttttattatcaataattttaaatgttgcaggtgttacttggtttattgcaatgggattatcaactggtagtgatgttactgcaatttataattgtagtgctttcactgcttatgtttttgcaattccaatcttaaaggaaaaattctcttggattaaagctaattcagttataactgcagttgcaggtgtctttgttgttgcttatatgggtagttcaaatcaaagtaatgatacaaataattatccttatagattaatgggtaatctgattattttagttggtgcaatattatatggtttatatgaagttttctataaaaaatggtgttgtccaccatctgaaattgttagtgcaagaagacaagcaactttttcaaattttgttatgtgtttaatgggtattagtacatttttcttacttggtataggtatgttaactgttcatttctcaggtttacatcattttaaaatcccaacaaattcaaaggcaattctgtgtattgttttaagtttgatttcaaatcatttatttagtgtttcattccttggtttaatgtcattaacttcaccctgttttatcatcagttgcttcattattaactattttagttgttggtgtttttgaatggacatttagaggtataattataacatttgctcaattgtttggatatcttttaattattattggattttcattattatcttatgcttcttggaatgaaatttcaaaggaagatgttgatgatggttatataactgatgcagaatcaacttatagtgcatcattagcataatcacaaaaaaatttattgaactatacttatttttacttgacttaaaatttacattctttttttcaaatatatccttttttatacatagtcttactttttgttattatttcctgtactataaatacatatgataccattatgattcaaatgatcatcttaataaatatcactgttacttactaaggaatgtgtatctaagaaccgccttaccttcccaaaacggcaattctaaataatttctaaattttctagaaaattgcatgaaaaaaatgaacgatttctctctgtgactaactgaatcttatatcaagttagagtctttcaactaatcacttcaaccctatatacaatgactgaagaaattacagctaaaacagcagaagtaaagattactgaatcagaacaaaaaattactccttgggaagttgaaggtgcagtcgttgatggtaaagctgttggtattgattatgatagacttattacacaatttggtactaaaaaaattactgaagaaacattaaatcgtttccgtgatgttacaggtcatgaaccacatcatttcatgagaaaaggtatgttcttttctgaaagagattttaataaaattctagatttatatgaacactggtgaaccattctttttatatactggtcgtggaccttcatcagattcaatgcatttaggtcatatgattccattcttattcactaaatggttacaagaagttttcgatgttcctttagttattgaattaactgatgatgaaaaattcttatttaaaccaaaacttacaattgatgatgttaaatcatttgcaaagcaaaatgcaaaagatattatcgcagttggttttaaccctgaaaatacttttattttctctgatttagaatatatgaattcatcattctatgaaactgtcgttcgtgtttcaagacaaattacaacttcaactgcaaaggcagttttcggtttccaagattcagattgtattggtaaattacattttgcttcaattcaaattgcaactgctttcccatcttcattccctgatgttttaggtttaccatctaaaactccttgtcttattccagtgtgcaattgatcaagatccttatttccgtgtttgtcgtgatgttgcagataaattaaaatttagtaaaccttcacttatacattcacgtttcttccctgctttacaaggttcaacaactaaaatgtcagcttcaaatgaaaatactgctatctttatgactgatactgcaaaacaaattcaaaagaaaattaataaatatgcattctctggtggtcaagttacagttgaagaacatcgtgcccttggtggtaacccagatgttgatgttgcattccaatatttaactttctttaaagatgatgataaattactggaagaaacttatcaatcttataaaaagggtgaattattaagtggtgaattaaagaaattatgtattgaagttttacaagatttcgttaaaacattccaagaaaatcgtgctaaagttgatcaacaagttcttgatagttttatgaaacctcataaattagtctggggaaataaggaaaggacttgttcctgcaaagcaaagagaaaagaaacaaccagctaaaaaatgattaagctagtataaatcattgtattgtattgtactgtattgttagtctatgatattctacatattaattatataaacagttttctatatttctatttacaatttctataaatttttgttcagatttctcttaaaacttttaaaagatcttgttccatagttttcaattgtttattaacaatgtcttcaggaactttgaattgtttaccaaattcatcattcttaaaccaattttgaatatcggttttctgtgattggaatgattttttaccatttaaaattatttcatctctgtttatttcacgacataatgatttaactaatttttgaactttagtaagtttactcatttgacttttaccgccaaaatatgtattagcgtttgattgtttcttgatactactaataactctatcaaaatcttgaatagttaaataataattgttaaaatctgctgaaataacattggatggtttagctgaaaatgatggaatgttttcagaattggaatttggatttaataaccattcaaaaatattcaagattgatttttcaatatcagaaaaaagtaattgatccctcttgtttcttagaatatctaagaacaattttctatagtcatcccaaattctactattttgatcatatactataagttccttcaataaagaaacttcaactgtttcaatattgtagatttcacctgaatggtaaagaaactattttcttaacagtttcattgattttgtgattaccacattcccacattatctttctatctatattatcagtgtaacttttaaatcaacatcttttcctgaatctaaaattctttgatacgcatttctcaatgtaggaatataatttgaattaatagatgtgaagtgataaatcttctttctttaatctagcattttggaattgcgtaacaaacagtctgaaaataagtaattgaagttttcaactcttaacttgaattcaatgaaaccttgtaatttagctgaaagtacaagttttcaaaacatgacattaacatagctggaagttccattggaacattatgagtataaaactttcattgatgtgttgattgactcatcatcacgggttttagaactcaaatgattcataaaatatggagaaagggtgtctatttgtacgtttttaattttcaatgattcatatattttctttaatggtggtgatatattagtatttgaataaaatgttgcaagccataagcttcagatggaattcgtatttatttttaaccaaagagttttcaagaacgataatcaacttcaagaaagtttgctcggttattgaatctttgttaattgttaagtatgtttggatcgcaagaataataaattcaaatcctgcaaaatagtcaaaatctggaagtttgttttgtaagtgtttagttgcatcaaaatattgacaacaagtagtgaaatactctttgctttcaaaaagttcaggtgaaacatttgttttaaatttcatataattaactagtataatcaaatccttctcagtagctttcctctcaccagttatcacagagttcatctcattcttttcaaattgttcttcaatcagtttcaatattgaagattttgataaaacgtcggaatccaaaagattcttcagatccaaataacaacataatttatgcatgtataatgaaaaataattagaaacagctttttctcttctcttcgacattatcatcatcaataacgtgaattttggcaagttgactatttcttccaactttataattatcaataatacttttgattttcatcaactttgttgatctttttacttgctaaaattgcaagtttccatgtatcgtaatcatcaacacatgtttcaactaaatacttaacagatgcatcataaagtttatcccacatttcattctttttcagttcatcaaaataaatcaataataattctaaatcactttctttatttaagaatttttctaattcttcgatacatgatttaacatcagccttttttcaatgataattcacacttgacatacatttcctgtgcattaataccatttttagatactccttcaacagattcaatgagtttcaaaccaagcattgctaataatttatccttaccacctgataatctatcactttctttacaacatttaattacaattcaccatcgttgcagctgcccataatttaatcattctaccattttctgtatcaactttgaaatcctttagataatgacattgcagatttttgcatacctattaaatcattattatcaactgtgtatctaaaccattcataagctaaatttggagtttgatattttcttatagctgcttcgtataaatcactctcaggtttgtaacttaaatatgaaaatgctttgtttaataaatttatactatttggatcagatggcgtctttttagataattctaaacaattctttaagtgcttcttcactggtaattttagaatcattacttaatgactgcttttgcttgaataaaacatttaatagcatgagattgtgaggagtttggttgttctttaatttttttatcagctagtcttaatgccaatgtataattatcagcttcaagagctgcatcgatcattttattgccagtcgacattgctgttctttgtcattaaaagaatgtgaaagttactacttaattaatgttgagcgtcaaaaaaattcttgaaatcgatatatattacgatctctagctttcattgctacaaaatgctacacgtaaatttctctaccatttgatataaaatatatttattttgtaaaaccaactctataagattacacaacccaagaaaaagcaatctaacaataatttttaattataaaaagaaaaattaataatacttaattagcaaaagtaaaatccccacttatccatctattaaccatatctaaactattagatggttgatcaaatggaaccatatgacctgcatcaaatacacgtaaaaatgttaataaaccatttgattgaactgtaccagcatgcgaattatcgattttggaataccaattttcaattgtagcattagtaaatgtatccttacctgaccattcaagttcatttgaccatcctctattacctaaccaattacagatataatctttatcacctgcataaagtaaaacaggaatatttaattctaatatttctgaaataaattgttggaaaggtttcggttcatcacctgataaaatgaaatttctgaagacttgattatcacaaccaacataagatttaacctctgaacctaaagctttcataacttcaggttgatttaaatatttatcaattggtgccatttcagggtaacaaccatcaccgatacaaggtttacgaatatcataataattcaaacctgtcttctcaaatggacccatcattctttcacaatataaatttgcaggaacacaagttaaagcacttttgagataataacatgatttaattaatgctgcacatcttggatacattgattccattttttggcaatcactatcaggaattaattgtttataacctgattctgtaccattacaagccattggaatataatgataatattgaattaaagcatcagttattccattaccaatcataactgatgataaattaaagattttttcctttcttatttgcaataacactagcaatatttggaatataatgacctgcataagattcacctgcaatatggaaatcattaccagctaaattaataaattttgtaaaaaataattgtaagaaagcatagacatcctcagctgcttgttgagtagtggaaactttacttttctctgcatatgaataacctacaccaacaggttgttctaagaagataattgaagcatttgaattccaagaatatggattattaacaggttttaaagttgtgccattgattgaggaaggtcctaattcaaagaataaacctgtcattgatgaacaacctggacctccatttaaccatagaataacgggatcatttattggatcatttctactttcgaaaaaccagaaaaataaatgtttatccttttcattaatatcaaaataaccagtaaattgtttaacagtatcaacacctaaaatagatggatctgaatcctaaatgtttattaactcttaaagaatatgatgaaagttcatctgaagatacataatcatattttaggacattctctaaaattgagttaatatctttaatagcacttttagctaatttagaagtagaataagattcatcttctaaaatagaactaacataagattcaatttcatctttattaactgtactttctaataattcccacgcatttgagacttcatcattaattaaagatttatcgaaaacaccttcctgggtatacttatcgagtaatacatgagcatttagcttatttgaaagaactttttgaccaataggactagcaaatactcccaatagagcataggatgctgatgttatggtaaatagtgtattaaaccccaccattgcaatgttaagttatctctccaaaatgaactgcatcgatacagccagtaattaagaatgagccctcaccaataataaaaattaaaattgtttaatcggaaaaagcaaaacttagagattgttctcaaataggaaagtgagcaaattaatatcaatattttccactttgattatgttgattgtctctgtttaatggtcaagaactattgatgagtaatgtttagtaatatgtttgagcaatatatctctctttttaactgtttaagagttcaactttatatctgtccaggtttctcataacaggacacttgaatatccacaaaaaaaaagttttctatcgattttcacttgtacatatttagaataatattaaatcggtgaactatctattaaatacatactatcactagataaaacataatgaaggttttacttcccttttctacaataatactattatttacaactttcactaatgcaatcgtcatctcagattcacatttagcttcctcttgtatttatttcttacgtgaactgccttggaattgtaccaatttaggtggtcatatgtcctcttcaacttggaccttgtcaatgtttaaatgatgattggttaggctcaataactaattgtattcatgattataaaaattcaacaaaggaaatgaatcatgcttatcatcatattgttgaaagatgtaatgttagagctaaaactaattataatgttacattcttaagtgattatcaaaaaaatacccaagataaattaataccagtcacacctttcttaaatggatcatcaatcacaggtcctgttagtattgatgatgcaacttttgattatttttataaaagttttaaagattataatattttcattgctatgtgtcaaagattaggttggggtgcagctggttattggattgcagtcttcggtctaattggtatctataaatttattgcttatagattcactccaaaatcattgaaaaattatgctaataaatatctagtttggaaatctgattggtttttatttggattgaatagatttgaagcaattgtcttctttttcttttttgtctatgttttattagcctgttgtattaattattcattggaattaaatgcatatttaacaactcattatttcttacttattgatttaattagttttagaactgatatcattggtttttcattaatgccagttgtttatttaatgggtattagaaataatccattccaattattaactggtgtctctcatcatgttatgcttcaatatcataaagttgttgcttttgttttctttattttatgtgttgttcattcagctatttggactcattatgcaattcatattggtggtggttatgcatcttgggctgctgatgcttatttctattggggtattgttggtacaattgtcgttggtttaatgattttacaatcttttgcctatctttagaaatagattatatgaaattttcttattctttcataatgcatttgcctatcttatttgttgttgcaatgtggttacattgtaatactttaggttggatgggatgggtttattccattgcttcaattttggttttcgatagagtttgcagaatttatagattcttcaaaaatggtttatttaatgatgttcaagttgatattgttgctaaagatgttgttaaacttcaattcaataaaccttcaatattttatttcttcccaggttgttacgtttatttaaccttcattttcccaaataatgttccatggtattatagttttccaatctcatccattctcattattaagatctcatgaagaaagtaataaaatggttctttacttaaaggccaaaagaggtgcaactggtcaattattgaaaattaattcttcaaatattaaagtactaattgatggtccttatggtgttttaccattcggtaaaaataaaaatgatgattcaaatgataaagttttaggaattgctggtgggattaggtatatcttcaattttaacttatttcaacgaaagagcaaaagactttagatgatatgtccaaatataaaataatatggtatattaacaatatccaatatgttgatatcttaaaagataatttggagtatttaatctttaagaagaatgtatctgttgatatttattacactggagattcagggatctaatgaatcagaaattcaaaactgtcattcatgtgaaaaaggtactgattctgaaactgattctttcacttcctaaatcatcattcaatattattcacagcaaaacagaaattggaagaggcttttatcacaaaattcagcagagcaaagaaaaatttactgttgtggtccagaaagtttcgttaaagaacttaaaaactctcttacttttggtgatgatttaatatgtgaaaatccatacattggtaaatgtataactattttcttctttataaaatgctactttccgttttaaataatatattcttcagttaaaaagtctttaattattacttgcttataatataaagtttatccactttatttatctaaagaacctctgaaaatatggtatgcagaagcttggtttgatgcgaaaactaaagtttctgcaatgacagtattttctggtcttgaaacagcaaataaaattaattctgcaatatcagtaccatataatggttcagtaccttcataaactttttcagctttacttttatcacccttaaatctaacaagggagaattcttcagttgcaacattacctggttcaatttcaataattctgatcttagtattaattaattcttctcttaaaacatgagtaaatgatcttaatgcagccttagtagcacaatagatacctccaccagggtatgggtttctacctgcaactgaacctaattgaacaatatcaccaacatttctttccttcattttattaacaactaattgagttaattgaatcatacctaaaacattagtttgaaacatttcttcaacatcagtttgtggaactgagccaattgggtctaaacctaaagctttacctgcattattgactaaaacatcaacagtttgaaattcttctggtaaattctttaagaatggttcaatagtatcaagttttgaaacatctaaagtttcaatatgaactttaattgatggatattcctttattaaatcagcttgtaaagcttcctaatttttcctttcttcttgcagctaagacaagttttaattcaccctttgcagcttctgcaaaatatttagcggtatggtatccaatacctgtggatgcaccagtgataagaatgtttttacctgaaagtctctttgcaatattaccaaacatatcaaatgtcaattatgaagaatatttctttgtctaaaagagaaaaagaagaagaattgaaatggaaaagaattagaaactttcaattgatcttaaataaaagacaaccacagttcatgtctattgaaattaacgtatcttacccgggaagcgagccccgacattcaacgatcgagaaaacgataagggtcgccgcaatttattttaccttgatccgaaatttaaacgttttttacttggctaatactattatatcggatcttctagaggttttatcatggcaatttccttgattggtgtgtattaagaagaactgtaagtattcttagcaaaaaaacatataaacttcgaaataatttaaaaacaatcaagggtaactataaataatataaaaatatgtaatttgtaaacaaaactataaaactcttaccgacaacagcaccatcagcaatgtgcatttcactttcatcaactttacgtaaagatttaccacctgtaatttgttcaagtaatgcaccgatatttggtggaccaccagttggattagattgtaatgatgcaggtgccatcgctggaggtggtggaggtggtgaaattgttggaggtgccatttcaggaactggaggtggtggaggtggtaacgttgatggaggtgccatatctggaattggtggtggctggcaatgatgttggaattggcggaatttcacttgatggaattgatggagcatctgtagttgcaacttctggtgatgatggtggagtcggatcaataaatgatgattcttcagatttagcatcataaaactcagatgcatctctacttgatgtcatttcacttgattctggtgcattaatttgtgtttgttcatctgaaacatttgaagcactttcttgaatatttggtgggaatgattgtggaattggaggtggcattgatgaaggaattgattctggttctgaaggtggaactggaggtggaaataattctttttcgacaactttttcaacttcattatatgaactatcaacacttggaatagattcaggtgtttgtagttgttggaataggtggaatataggtactacttcttgatggttgtgcgtttccaccaaatagcattgatgcgagttcagcttgtttatttgcagtaggcatatcatcatctgaatcttctttttctgaatctgaccaaccgtcatctttacttgatacccatttgagattctcgttgagccttcaatttttcatggtcaatcttattcaaatctgtagatgaagttttttcagttgaaggtttagaaaatgggttattgttaacaacttttggttcttcagatgcttttgcaacaggaactggttgtaccgtagtattggaagtactatttgccattgatgcaaatggattgttactatgagctgataaatctttctctgtagttgcaacttttgatatactttctttatcatcccattcatcatcagattcttcagcttgtttttttaatgctgccatttcagccttcagtttagccaagtttttcttccttttcacgttgcttacgattctttctttcttgttcacgtttctctaacttcttgcttttgctttaacaatgccttatattcttcgtcatcttcttcatcatcagcatctgtgtcactttcagtatcaaagtttgttggtttatttgatgatgcgggtggtggtggaggtggaacattattggaacgtgatcttggtgtagtcggaggtggagcttgtttaacaggttcagcaactggagcaacaggttttgcaactggaacttcttcaactttaggttcggcaatttttggcgattcaacctttggagatgtatttgaagatgtatctgaagatgtttttctactaattcctaatttagccaatctttcattcattctcttttcagccttttctttaattcttttagctctttcttctgctgcagataaaccaggacttggggttgttgaaacgttagttggtactacttcttctttttgaggagcttgagcatttggagaaacctttgaatttccttttgaacttccttttgaacttccttttgaccttgtaaatatggattggataacgaagttggttgtgaaattgttgttttgtgtgcaggtttggttgaattcaaataatcaataaaatcagaaacttctttactttgaacaccttgttttttctcccatttggaataaccaacagacattgaattagttaagttcaatgaatctgtaacctcagaaatcaatgatttgattgattctgcaatatcttgaacaatacttttttgtgcttcagtttcttgagttacagaaataatttctttacttaatttagcttcattatcttcaaatgcatcaaagtttggagttggtttaccagttaatttagccatctttgcttgtaacagagctttttgtttagcaattcttctatctgcttccgtaatttcaccgtttggaccagcacctttaatttcaattcctgatggattttccttttgtaacttcaatctgtaaatttcaatctttgcagcttttatcttatcatccatttgagagattgcctcgactaattgtggaactttatcagaaaatttgttcaactgagagctcaatttggttttttgttcaacagaatcaatatcagaataatgagatgagtttaatgtagattgtaagcttttaattttagtttttaacatttcaatttcatttaaagactttttgttgaattgcatttgatgatgtatcatcatcttcagcatcgattgcagcaagtaaaatcttcttctcgtgaatttgttttttcaaatcatcaactgaaagcttagtggaaaatgcatttgattgagatggactttcagtctttcttctatgtctggaatttgaaacataactaattgaattatcattattcttataaacagtacctgatttagtaacaccttgtttaacattagccgcactaccaactccaccatttgatgcttgttttctcaactgatctttcatactgtcaacagtagttttctaaaacttttgaagatggaggaactaattcaggtggtaaataagttggaatatcgtaaccattcaatcttctataaattaaatgcatagcaacagcaaattcatctttatttaatttacctttgtttccttgatcacaaagggtccaaatactttccaaatcactgaaacttaaaccagatttagtaaagacaccaatagcaatatcacctgaaacaaatccgtgtctttctttatcccattgtttaaaaatattatcataaataactttttcttgttttgtgatagcccatgtaacattagaagctgatgagccacccatttgattttgtaatgaatgatgattgagattgagcatttggcatgaagtgtgattgcatcatatccatacctggtaagccacctgttggtgttgagacaaatccccattgacctggtctaccagttggcattggttgtaaacccgtttgttgaggcatcaatccacctgtttgttgattaataaatccacctgtttgttgaggcataatccacctgtttgctgattaattaaaaccgccttgtttgttggttagtaaaatcacctgtttgttgaggcataaatccaccagtttgttgtgcagtaaaactagtaattgggggtgcagtacctgtggcttgagcaagtaaaccaccaccagttctttgtgagaaaataccagttggttgtgcattaagcataccagtttgttgaacaggaataaaagaagatgtttgttgagcagttaatgggactaaaccagttctctgagcatttaaaggtgcttgagagttgttataaccagtcgcttgtgatctaattggattgtttgcagaataatcattatgagctccaatattaaaattgattgtatcaacaaaaccagtaacttcatttttaatcttagtaggtaattcataaggaacggattgacctctcttagccatatttgctaaatgtagtgcaacagcaaaattcaggaaacattaaagaacctgatttattagtatcagctaattcccaaatattggataattgaacagcagaaaggttagatttcattaaaattgttcttgctgtattaccatccattgcattttcaccctttggaacatgatgtctaaaaatattttcaaatctttcttgatctcttgctgaaataaatgataatctaatatttggtaattccaagtcatttttttgagtacccatatcagctaatgttgaaatgaaaccagtagggttgagcggttaatggttgttgttggttaaatccggttgcttgagattgtaatggcattgaaccaaaagtagttggtggttgattccatccagtggcttgtggaacttgttgttggaaaccagtagcttgtgcttggaaacttgtgaattggtggaccttggttccaacctgtagtttgtgaagctaatgattgttgttgttgttgtgatgcttgttgataacctgttgcttgtgcttgaaagctggtcgctggtggaccttgattccagccagtagtttgggatgttaaaggttgttgttgttgataaccttgttgttgataaccttgttgttgataaccagttctttgtggatttaagccttgaccaccagtagcttgagcttgaaaactagtcattggaggaccttgattccatcctgtagtttgagaagccaaaggttgggtttgttgttgataactttgttgttgaccaaagcttggagcaccatgttggttgattttgaacctgagtaccaaatccaaatccagttggttgagattgaagttgattgaattgagattgttgttgaggttgctgttgttgaggttgggttgaccaattgttaacataagccaccttgttgttgaccttggttattgttataaccgtaggtttgttgtggttgttgttggttgtattgatacattatggaagtatacttatctaccaataattaagaaaagtgagatttattaagtttttttaatgcaaatgtgattttttgaattttttataatgaattaaaataaataaagagtcaattaagattggatccaagtacacctcgagtgttgatgtttggtcttatctgctagaaggaagtaaggataatataagtgaatgaaacaactcactaactaattatgaacatcattcatggtgcgagttttaaattttcattgaactactatgaaaatgcagtaacaattaaaactacgtatattataaagaataaaaaagaaagggaaaatgtacaagcagaagatatgaagtatatgaatcaagcatcataaagttgttgaattgaattaactagaccatcaactaaataatctttcaactcgttaggtaattcagcggtagaatcagaggtgttttcaccaagatagactctcatgtgacctaatatgttaactaatagcttatttaacttgaaacactggtttggatcatatctggaagacaagtttatgattgcttgcatattcgtttaaagagttaattaaatcaatggataataattcataaacattgagtaatgataaaaattgaaacaatgataatttattgtgtttaacatcaggaaacctaaacttaattaatattttaaaagagctttcgtaatcatttgtacacatcaattgatatttcaaagcggctgaaagaattccaatattaatttcattattgtcttggtcgaatctggatttactaaattcaatacattcagataatagttttgagtttggttcagtgaaaaattcaagtaatttgcattttaacttcatctcatcatcagtggaatgatcaaatagttctattcttcttaaaagtttcattatctctgatttaagttcagtacatccatttgatatattagtttgttcaagttttgacaaatcatcaagtttaaggaactcaaaacgtaagatttccaactcgatatttttcttgacacataattgatataatttgttaatcaaaaacttagaaaaaatatcagttaactcagcattatcagatttatgaaatataactttctcatataatgttatatctttgaatctttgcattgttaattcatttaaattttcagatttcaagtattcgaccgattttagccaatgtttttctccagctttttcaacaattattttattgaatagactatttaaagacttataatcattcattgctaaccattcgcttatccatctccaatataatgccttaataaaactattttgtgcagaatcttccaaatttaatgttttaatcatgctcataaagaaattataatttaattttttagatctaatacagtttgtgagaatttcttcggattcaggcatatgttatttgaaaactatctttagctaattgtttaggattgcgtagtacagctaatgatgatgtgactataccaataaatgaataagaaaatttgttgcttttttgaaattgtgaactaagattgataaattgatggaataacataacagtaaaataaataggcagataagaataattttatcataccacgcatacccaaactaaaatcaaattcaatattagttggttgattcatttgaagtgaggaaacgctattgaatgaaaaaataggaagtgcaaataaacctctttgattaattgatgaactatttgcaaagtcatccagtgatgaagctccgagcatacatcctatactagcccatcattattttatttgttaatgatcgatggtctggtaatttgttgattttgaaagttaggatcctggtgacactaaattgctcccattacttgtaccattactattgttattaccaaaaggagaagaatgtaaacttaccgattgtgttccttgattctgttgttgaaaatattgttgcttgttgaagatttacattctgacgtacattttgttgttgttgttgttgttgttgttgttgttgttgttgatttattatttgattaatattaattccagatgaatcaataatgtatcttaaccgattgttttcttctgagagatttgcacattttttctctaaatgtttaatatattcagaagctttcaaaagaatggtagctttatttaatttttttgctggttttaaaccatcaagtttaatttcatcatctgaataaccattaccttcataataatcatcagtttcttcaacttcattacctgtatttctagttctatgattaccatttttagcaactaaaatacgtaaagctggaacacaatttcttaattcaataattttggaattgatatttgttctatattttttttcaattaaattatgagatgatttaatcttacgaccatgttttatatttgaagatccaaattctgtattggaatctgagttattatcagttgtatcgaattgagtactttcattatttggtaatccactaagattgaaacttaaagaggaatcgactgattgattttgtaaattatttaaacttgttggaaaacttatattatttaattcttcattagaaaggacttttcctggtcttaaaattggattatcattatttgacatattggaagcacttctactttcatttttaacgttcatattagtagtatcaagattagtattattattattattactattattattgctattattattgctattattattgctattattattgctattcttctttctgaatggtgagtttggtgattctgattccattttactttaacagaatcttcatctgcttcttcaacagtatttaatgtttgaaaatgagtattatgataattatcctgagtattgaaagtaactgtactatttgaagcagattctgccattggtacaggaatcaattgttgaggataaagaatatcattattcaaattactttgattagctaaatcgacattaaaatcatttggatcttgactatattgagaatccacgtgtgaacttgttgaacttaaaaagaaatcatcaggggatgagccagttgaataaggagataaaattccagaatttagggaactaacagcatcattaaaatcattaaaattgacttcagaaccaaattgagatgagtgattactaacaaaactaccgaatcttggattatgttcagtatgatgactttgttgtgatggtgaaaatagtgaatcagcaaacatggaagattggttattaatttctaatggtgcagaagtttcattattgtaaccttgtgattgttgttgctgttgttgttgctgctgttgttgctgttgataatattgttgctgttgttgttgaagaaacatttgagtacgatcaatgttttgttgattttgctgttgttgttgttgctgttggttattcatttctaatactctgtaataattgttaacaaggggtgctcgattttataagagctgatgacgttaattataattaattaaatttttgaggcaataaatataatattttttatttttgcaggagaaagaaatttcaagaaaaaaatagctattgtgaatttttaagacacaatgtatttgatactttccaaatgcaaatgatgtaaataaacagggaactgagtgttgcacagtgaatggaaacaaaacagagggtattcaattttagagagacaacaattaataacaaaaatttgaatactatataagaatctcgaaaatgagaaaacgaatcaaattacgtcggcgtatattttttattcactcaaaaatttattcttcttcacggtatgttatctctatttcttgatattgtattgttaggcaaagagtgtattaatccagtgggattaatatactctttgttatacctaagttgcgtaaatctctgtaaactgatttgaagaaacttaatttggtaatactttattgactggtaattttattttggtttgttaatgattaacaatgtgaaggtgttgcgatgacctaaaagcattcctaccaatcaaaatcattttatttgcagttgcttttttctttattaattattgccaataatagatgttttctgtttatgataattgtaaattatcgtgagcccaatagattattaaaaggggattggggaaaaaaataactccttaaagttatacaatttttacagtgtatgataggattttatgatttagttttaatgcataaatatatatatataaaactatttacaggggaagggtagtgaagattatatatatatatataatgattaattaatgtagtttagtttaataatttactgattaaattagcatgagatttatatagataaatctggtctgattaatgttaaaacggttaaactgtatattgaaaacaggaatagaacgattacaaatgcgtaatatgattatgtaaatttagtgaaaaatcagatgtagattgatgacagtgttaaccttagccaagatttactctagagttagaaaatgttacgattaacgttaataattaatcttggtttaaaaaaagtttatcgtacgttttttcttagtgctagcgatgtctctttaaacgggaaaaaaattaatgcgagctatgtggatcgaacacatggcctccagatcttcagtctggcgctctcccactgagctaagcccgctttaattgtatttttactgctaatgacatttcagtggatgctaaataaaggtcacgtgatgtcaggatttttcaaaatttattgtttttgtgacagattttaaggtcaatgtttggaaataaaaaaaagttattttactaacgtttttttttataataaatagtcaacagataaaaagatttataattgtagtcggcattggaaaaatgcatggtgccaaagatttaagtcattttccaagactacaagatcgatgttgttggataatacagttgacataacaccaatgagtgctttatcaaaacatgggaaactcatacttgatgttaagcctcattaggtatgatatttagaagaaaaccaagtgtttcaactaattaatgaaattgattttctctttttaattctgtcgttgatacttccattttactttttgtacttttcttcatttaaataattttaacatattacaaactattctatattaaattgaaaagaaaataaatttcttttgttaggcagcctttaatattagctttttctttttatttcggtattaattacacagaaattatattattgtaatgaatctaaaaaattccaaatctacggctaatgttctctccatcattatcagcagcttttcccgatgaagcatctgaggataatgatttaaacttagtatcaacatgtttatgcatctctttcaagaaatcagaatatgaccaaattaaatcatcagatttatcttcaacaaacatttgttggaattctctttcatttgaatcaattctaaatcttactatttctatattctgtttctttgtattattgaaatgtttagttaaatactcaaccatattacgaacttgtaatgaaatatgagtatctaaaattggtaacgaagaaacagtatcattagataattcttgaatattttcaatatgtgatccaaacaagtcctgtaataataatgggttcacatcactgtggacccatatcatcattttctctccgttataaattaaataagcaccaccaaattctaaattattaacagtcaatgacaaagatttaccaactcttattaaaccagtttgttcatttggaataaaatcttcttcgtctaaagaatgaatacaatacaacactggatataagtaaactgataattttgttaaattatattgtgataagttaaacaatgaacttacacgtaaatcactatattgtattttacttttaaatgccttagttttcaaattgatagtataaccattggtaaagttttcaaacattctggtaatataaactgatttgtttgattcagtaaattttgatttcctgcaatataatgtttatatgcagctaatatatcagatacttgcatcataagagaatttttcagtgctaccatggtagtatttttgaaattttcattaattctctttaataaaattttaacaactgaatcttgatcaataaaattgaaaacatcagaaattctttgactaactgataagatcatattaataactctaacttttcttgaaccatctttagaagtatataagaaagctgcttgaaaatgtgcatctttcgttgtgtttaattttgaatcataagtgaaatcacaaacaattgacgaagtcactggaaactattggaatagtttggtgctaaatcacctgtaattcgtcttgaaaggaaccataataatttttaacttgtaaaccatgagaacaacgaacctttaattgacattgataacctgcaatattttctataactttgttgatttcaaatattaatgactatttcatcggtttcataattaaatggtaaccattccttaacagtaccacctgtattcgttgcaaatgaagctagattaattaaatcaacattggattgtgtagcaataataaattgacaccaatattatccttaacaaattcatttgacaagtctgaataaaatttattatcaaatgtaaatgtttccttaatgtaatcattttctaatttaccattacttgttttcaccattaaattaccaggacctaatgatggaattgttgataagacggaaataatttgaccaccaccaacttccttaagtaataattgtgctgcttttcaaagctgcgccaaatgccggttcaggagctttgtaactatcatttgtttcaattgcggttaaagttgaatcaattatattaaatgattcatttggaatcaacaaactgtaccatcattgaatggaatgaatggatcttctaaatcagtgactaatgaaacagtagttttttgtaaatctggagataaattgaagaagtgtattttattatcaaatccaataattgaaatttcagcaccaggtggtaatttagatgaaccgtcatcattgaatagtgatattctaattgcagaacagacagtttcaacaacttttaaatgatatgaagagtgagataaatctaataaaaatacttctatgaagtggattatttgattcaatattttcattaagattatactcctttggaacaacataatcaataactgcagtatttaattctggtctaacatgataatcatcccttataccattcattccaattgttgaaatatattcatttggtagaggagaagagaatccacaaatattacagatcatattattatcagtatattgcattgcaggatttaaataagcacgacatcttctacatcttggaactgttgaaccttcttcaattttaacttgtttaatattcattgattcagtatcggattcaatatttgattgaaaatcagcaaatggtcgtagaacaatacctaaaggaattttagttttttctcttaactcttcagaaaatggaatactatacattgaaactcgaccaaattgaggaacaacattaccttgatcaattgatttatattcagttcctgcaaatggtggtaagacatgttcgaaacttaaaaattcttgattttcatatatttcattcattatatttcttttattagaaattgataaatcatcgacaactgatacttcattaatattataagcttcagaagtaatagtattgttgttaacagtattgttgttattaatattattattcaaatttgaaggttgatcattgaaggatgcaacattattaacaaatggtgaatgtatactagaaactgaaggtgattgttgaacaaattgatttggaatttgatgtgagaatggagatccattgataacagatgcaggactttgaaactgattattaaagggaagtgttgaagtgtttaaactagacatagaagaagaaaattgaggtggatacagaccaattgcagcttcatttggatcaatattcggatcattaccatgaattgaattttgagaagtgaaatcatgaaatgcatgcagccctctctttttcgatttacttttcacattaggagttccacccaaagatatattttgtatcccatctacaagatccccagacatgtccaacagatgattattaacaaaaatataatccaagatcaatattttaaggatcaatctgttgataaataattatattccattcatgttgacaatttgaagatgaaaaagtaaataggggaagaaatcgcgaattttgacgcgctctgtgaaaaaaattgatgatttggtaatcattgtggagaatttgacatctttttggcgttgtttacattttttgattatttctttgtcttgaaggagttgtttgatttctaatttattttctattctattcatcttattttatcagtcaattacaggtattgcaatgggtgtgtcaggtctattaccgatattgaaaagtatccaagaaaacaccactttggaaaggtatcgtggtcaaacactagctattgatacttatgcttggttacatagagcttcgtttacatgtgcagaggatattgtaatggaaagaccaacaagatcgtatattaactatttcaataaaaggattaagatgcttcaacatttcaatattacaccatattttgtatttgatggtgattatttaccaagaaaggcagctgttgaaaaggaaagggaggaacgtagaaatgagtataaaaaattagcaaatgatgcaaaggcaagtggtaataataaattagcatttagccattttcaaaaagcttgtgatatatcaccagaattagcaaaatctttaataaatgaattaaaaatgaaatatattaaatatgttgttgctccatatgaagctgatagtcaaatggtaatgttagagaaactaggtttagttgatggtatcattagtgaagattcagatttattgattttcggttgtcaaaaattgattactaaactaaatgatagaggtgaatgtattgaaatcaagagggaaaattttgcaaactgtaaaggctcatatattaattgttttaatgatgatcaattattattaatggcaacaataagtggatgtgattatacaaaaggtataactggtattggtattcaaaaggcaattcaattaacacattatttcaaaacttatgaaagagtgatgatgaatataaaagttgagggtaaaccgattccagaagggtttgatgatgaatataaaagagcaaaaattgcatttaggtatcaaatagttttcaatccaattaatcaaactgcgcaacatttaaatccagtagataatattgaatttgataaagattatctttatcaatgtacagggtttttattggaccaagaaatacataaaaaaattgcaacgggtgaattagatccattcagtaagaaagttttaatttcttgggataataaagttagtgcaactgccacaagatcactatctttacctgtcggatacaataataataatagtaataataagtataataggtataatatcaataatactgtcaatgatactatacttactaataatagaccagatatttatccactcagattacagagatcaaaaactgagaacatagtgatgaaacgaacaacagaaacaccacccattaccaaaaagaggaaatctgctatgaaaattgatcagtttacacaatttatacgtgataaacagaatagcaacaacaaagaaaataatatgagtaataatgctttatcaacaaccagtaaaagacaaaaattattgaacaagaatgaaacgggacaacctacaataagtaaattttttagtcaaggtattagtataagaaatgagaaagttgttgaaaaagatattgaaatcaaaagcaatgagtttaatgctacatcatcagatgttgaagatataagtgaagaagagattaataatttaaatatgaaattaagtaatggaattaaggagactcaagatgatatactaacatctgatatcgaggaagaaagggatcataactctcttagcaaaataagaaatgaagtaaactctagtatttcagaaaatcaaagtgatgaaacaggatcagatatggaagatattataaatagttcagatatatcacagagtaccatcaccatggataaaagtcttaataagaatacaccaacatcattgattatgaacaataacagttcgttaactatgagcacagatacagatattggagaagttaacactgaatacttactagaagtggatgataaagatgaagttgaggaagatggagaagaaggtgagttatgtaataaaagaatgcttttggatgatagtaatacagagtcagaaagtaatgaattagttgataaacagaatatgttagcagaaatatactcatttaagacacaaaacagtaaccataataatcataataatatcatgaatattaataagaacagaagactgattgatgaaaatgaagagaataggttcaatccaagtaaatggatgaaaacgaaaaaaatcaataatagtcatcaacctgtcaatccatcaccattacaacaaagaactgcattacaggatgttaccaatggttcaggattgaaagatgcaggattaaaagatagagggatcacgactaggacgcagtggattatcaagattcagataccaagagtgataatacagttataattttaatagtgtgtatagtcaagttattatatcgaattacgtaatgatgttttgataaggagagcttagttttcctaaataggaaggcgtggattaccgcattgggaagagccataaaatgtactcaatcaatgtaaatttagcgtttccacatgtggttttcgaatccattgggtatatggacagagagaatacaatgtatttaattaattaagcagtgtatacatattgtatatacactaactgcaacctatacccaagatagagggaatgggtttgttatgagggctggtctctatcataataagggaataaagacacaccctcgcgattcattgataaatttatataaggagaggtttcgggacaaaagtggcgatttctgctgtttgtcgaaccttttacattaacttgtttctttcttttactttttaaagaataacaaccttattcaattgaataattaataaacacaatgcatagaacatactcattaagaacagcaagagcaccaactgcttcagatttacaaaatccagttccagttccagtttcatcaactaaaactccaagatttttcggtccaggtggtttagcatcatcatttagaagaacaactgcaggttcatttggtccagatctttcaagaaaattagctcaattagttaaaatggaaaaaaatgttatgagagcaattgaagtttgttcaagagaaagaagagatgctgcaagacaattatctctttggggtgcagataatgaagatgatgtctctgatattactgataaattaggtgttcttatctatgaaattggtgaattagaagatcaattcattgatagatatgatcaatatagaattactattaaatctattagagatattgaaggttcagttcaaccatcaagagatcgtaaatataaagttactgatcaaattgcatatcttaaatataaagatcctcaatcaccaaaaatcactatcttagaacaagaattagttagagcagaagctgaatcattagttgcagaagctcaattatcaaatattacaagagaaaaattaaaggcttcattctcttatcaatttgattcaattagggaatatgctgaaaaagtcgctcttattgcaggttatggtaaagctttattagaattattagatgattctcctgttacacctggtgaaactagaccttcatatgatggttatgaagcttcaaagcaaattatcattgattgtgaaaattctttagcaaactggacttttgaaactgctgctgttaaaccaactctttcatttaaagttggtgattacgaagatgaattagctgatgatgttaatggtttatcagttgaagatcaagaagcttggaatgaagaagatgaagaacatcatgcagttgctgcttaaatttctcctcgtattcaataaaccaccctttttcaatcaacaaaataacattcattcaattctctacaattttattaataataaattaatattatattagttgtttactttacttcaactttactttactgaaacattttattgattttttatcgattgttattatttacccactattttattttattttactttattttatcttagctttctctttgtattcttcataagaaatgtactcttactgttataaattaataatatataattatcagtatctaattctcaactattaaacaatttaacaatttaacaattaaacaattcaacaaacaatcaaatatctgaatttgattgattaacttttccaatgaatatggatgttcaagggtattggacatatggttgtcttatcatatttaaatatcaagttagcttttactaattcttcattattgctatcactatcatttgcaaactcatccttcaccccattttcatcatcatcatcatcgatatttatagtatcttttttatgttgatcaaattcaagtcttcttgtaagtaatttttcacatctcctccagtgttgagtacctaaatgataatcataaccagtaaaccaattccttattttaacgatttcatcccaagcttataattaattgacatttacatgattcattactcaaggataattttaatttttcatttgatttattcttacccttttcattactattatcgttacaaatggaataaatttcatcttccgttaatttaaataatattgaaatcaatttatcctttgtaagttggattattataaatatcattaacatgtttattagaatatagaattttattatatttagtcaatttcaatgatactttatcattagaatcattattaattgcaggtgataataataatggatgtttaacacgatttttctcaatctcagccctattggcaaatgtcacttacagttataacatgatttctcgttaccttaatatgtgatcgtctgtatattccggttagtatttgtcaatgaagaagagttattgtatatgatgatataatacatacattggagccattactatgatcggttaacaaagagaaactggtgataattaatatggagtattcaagtttttgatgtaaggacaattccgaggggttattaggctatataatactgtaagagaagatattatcggtatattgtatgtatgtcttcttctgaatcttctttcattgaatattatatcaccaaatgcaaccatttatacatcaatctggcaatgaatttgctataaatcttgccgcaaaggctaaggagacaggtgttaccacaatgtttaatgatgatccacaggtttcagttgataaatttgatttttataaaaaatattcattctttcatccagatactaacaaggatgatgctaatgcatttgcaacattagttagagaatgtgttcattttgaagttgaaacagttgcaagtatgttaacatttggattagatcttaatttagtttatccacaaattacactttcatatatttacagaagttgtcgttcaattttaagggataaatataataatacagatgatgcatttgcacaagagtttgcaagagaacttgttagtcaagtatatgcatttatcaaacctaaacttgacctccctgcaatgtcatgggaaggtgtagaagcgaaagttatttgaagccattgggaatttcaacgaaaaagtttctgagccattatacacttttagctataatatgttcttttgtaattctgtaaatataatataataaggtatattataattataactctaaatatcaataacaatggatgatggcgatgggtttgctcctataactgcaatgttttattctgttttccatccaactgagggaacaaaagtaattcatcaagttccaagtggtgcaattgtaccatcaattaatgatgataataaaataaataatagtttacccgattcatcatcatttgaacaaccattatttgattttgatataattaaaaattatgttataccaaaacctggtttatgcaataaactgattactttaaagattgaaaattatagagtttgtggattccctgttaatatttatgcaccacaatatgctagaaattcatttggatttaatttctgttttgttttcccatacgagagtgatacaactccttatgagggtaatattaaaagaattggtaagatgtttagagcattagaggaacagagtcaacttttatcaaaatctttaaaagattcaacagtttatttccaaaattcagtcaaagttaatgaggatagtattaatgaagagaaagaagatgaaaaggaaaaaggtcaagatcttttattttcgaaagataataaacaatatttgaaaattgttgatgattggggagattcaaatagacaattattagttgataaacaagcacctggattaaataagaattggcaatcaaaaatttcatcaattgaatcattaattcaacaaatttatcaagacttaaataattattcagaatgtatgatatcaattgatgaatcaaatactgttgatttgaaaacttttcccaatttctccaccaccaccaaaagtttacccttatgatgtaccaatcgaattagttaatttaaatttacttattgatccattatgggatcctacaatgttgaaaattataccatttataaacggtaataattcaattgcacaaataagtcaattgtcagatgttaatatggatttaacaaaacaatgtattagacatttacttcattataaatcaatttcaataattgatattttccaattctcctaatagatatttggtatcatcatcaattagagaattcttaagtgattctaaaatgtatagagcatgtcaagaatatgttttcagttctaaaggtgtttttggtgatattccaattaagaaaattaaaagtgaagttttcaaagatgcagataataataaaagtgaagaaactattgttaaatcattaccaagatcatccaatacaaagcctgaactacatactgttgattcatcatcttcaagtggacagtttaagagaaatattaccaaaattgataaaattaaattaccatctaaagttacacttttccaactttacaatgcattaaactcctagtgaatcattatcacaatggtgtattgataatgagaaagatttgacaaatatcgatattaggaaatttattacatttggattatgtaatggactcatagctagaatccatgtatatccagtattcagaaatgacagaagtgtagaagataacaaggataacgagatgatacaaatggtgaaggacactcaacacttggattcactgtgtacgaggtttcaaatgggtagagatcaaatactggagaaactcgcgaaatttggcactgtggaaagtgtagagcgttaagttaaggcagaggaagaggaagaggagatttttccaaggaacgttatttttttttccctttgtttacatttacaactataactggtttcatattggatatatactaattgggtgtattagcaacaatgtttagacgacagagcggtagacgtggtagcttgatgggtgggaattatggtaataccaataatggtagactttccaatgtatctaatactgcaacaatcaatgaagatgttagtctgtttacggaatcaattaacgtggttgtacgatgtagaggaagaggtgtacgtgaaaatgaacttaacagtccaaatgttgtatatacatcaacagatagaccaacagaggttcaaataaatatgttagataataatcataatgagaatagcaataataatactaatactaataatgatgataagaattccgatatttcatcaactaaatataaaacttataaattagatcatgtttatggaccatcagttgatcaaatgacatttttccaatctgctgctgaaaatatttgtaatgattttattaaaggttataattgtacaatcttcgcatatggtcaaacaagtgcaggtaaaacttatacaatgtgtggtaaaaataatggtaatctattaacaccagaaagtggtataataccaagatgtttgaataaattatttgaagatttgaaaaagaataaggataaagatgatgtagatgatgaaaatatacttaaatgttcatttgtagaaatttataatgaaactttgagagatttattaagtgatggtaataatgataaattacttaaaatttatgaaaaggataaaaattataaaaattaactcattagaagaattttatattaaagatttcaatgaagcaatgaaaatatttcatatgggactaaataagaagaaaattgcatcaactaagatgaatgaaaattcaagtagatcacatacaatttttacagtttatttaatgaagaaaaaacataataacaaatcagaatatcaattttctaaaataaatcttgttgatttagcaggttctgaaaatattaatagatcaggatcaatgaatcaaagagctaaggaagcaggttcaattaatcaaagtttacttacattaggacgtgttattaatagtttagttgatggatctaatttcataccttatagagaatctaaactaacaagactattacaagattcattaggtggtaaaacgaagacaatgttaattgctaatatatcaccaacattaattgatctaaattcaagtatatccacattagaatatgcatcaaaaggctaaaaatattaaaaattcttcacaaattggtacaattataagtgaagattatttattgagtgaaatgattgaagagaatagaaaattaaagttagatttaatggccactaggaaacgtgaaaattgtattataatggatgaaaataattataaagagatgtatttgattcaaaaaaatttaagggatgaagttgatgagttaaagggactaaaattatcattaatgaaacagttagaatttcaaattaataaaattaatgttgaaaaggataaaaatgatgaattagttaataatttaacaattttagagaataaaataattgaatctaagaatataataaatgaaaatatgcataatgaaaatactttaaaacttaaaattgatcaattaactaatcaattcaatgaaaaaatcataaagattaaaaaacgacatcataatattaagagtatattaaataataaaataatgaatcaaattaatttgttaaataaggaacttaatacagataatattataagtatgaaaagtctaacaagtttaaaggatgaaataaataaatttgatgaattaattaaagaaattaacaataaaaatgatgaatcaattgaatccatgagtagtatattaacttatattaataattataagaataataatgaaattgttgaaactcatttaatgaatatcaatgccaaatttgatgaaaagatgaataatgattttaaattccataaatttttaaacaatgagttgaaagaggatatgaaagaagaacttttcagtagtttgaatgataatattaaagatgtcgttgatgaatttaagaaagagatgaatgaaaaaattagtttactaatgaatgaaagttttagtgttaattacaaacaatttttaaagttttatcaagataagattctcaccaaggataaagaatgggatgataataatacccaaaatatgaaaggagatacaagaaattcatggatctttaagcaatgttataaaatcaggtaatgaagaagttcatggtgtttttggaaatatacgaaatgctgttaaagatagtgtatatgaagtgaaggataaagtaaatgaagtacgagataattataatattgttaataagaatattgaagaagttgaagaagaaatgaaagtacataaaaaatatactagtgataaagtagataaatataaggaaactattactgaacttggaaaaaatattggaactattctagaaaatcatatggtagaggaagaagaaggagaagaggaagaacaggaggagaataatgataataaagaagttttaaaagtagttaaggataattctaaaaatatcatacgtacatcatttggtattaagagagaacatagtatggaatctgttttagttaaacgtcaatgtaatgaatgaataaacaatatgtataataaatgtaagtgtaagagtataagaatgagtaattattaattatttacatagttgattaaaaaacttaaatataaaatttagttatagatcttttttatcgattgaactttgttcagagatacttctcctaaacatttctaaagaattattggtactaatactagcaacaccagaacttgatctacgacgttgtcttcttgcaatatttggttcaacatgttctttacctaaagttttagctaaaagtgataaaatatcagttaatgataaaactccaactaatttaccagttgcatgaatatcttcatcattatgataatgattatgatgtggactatgattgtgattatgtgaatgtatgattatgatgttgatgttgattatgattttcatttgaattattatttaaatctggcttgaattatccataatctatgagattttgttgcaactaattttgcaattgctctacctaatgaagttttacttgtaacatgaaatattgggaaagaatctttaccattttctaaacctcttgaatttaatataactgaaataaaatgtaaacaagatttataaagtaaatctgattttgaagaatttgaaactaatttaacatcagttacacttatattacctaaaagatgataatttctatcaataacagctaatgaactcatttttaagttatgcattttcaataaagcatcaattaaagtattcatcaccgaaaattgaaattggatttgatgaaccaatatttaaagattttaaacttgaagataataaaggttccattgaagggaaaacgacgtgcattatcccataaaaattttattaatcttctttgagataaaatacctgataatttttcacaattattttcattatcattttttaagattgcaattctatgaacacctgtacctaaaatttctacaactgttgataaagtatcagattcagttaatttaaagaaaggatttttatttgttaattttataacaaaatctactggaacttgattaccctatttgagcatttttaattaattttggtatattttcctttggagtataatttatatttttcaaatcatcaactttaattttatttaaaactaataataaataagtatttaaatcagtataatcaaatgtaagacataaaccttgattattattattattattattattaattgataaatcttcaactggtagggaagttaaattatttttaactaaaacatcaaaagcttcttcaactgatagatttgaatttataatgattaatttatttttttcaattaaatcagataaaggtatattttgccattctaaggcaacattatttagagatggaggattatttattgaaattgaatgaagatattgaagtatttcttgataattgaggagataaaggtagtaatgatgatgaagtcattagaattgttagaattattattattattattattattattattactatcattaattgaatttgataaaattgaagaaattgaagaagttgttggagattgagggaaagcaattgaaattgaatgaggggtatttggaattgattgttgagttaggagaaggattattaacagtattagaattattattattattatataatattattatcagataaatttgaagaaatatcaagatttgaaatattttcaagtggattatctaaaaggggaggtgaagataacatttcaacaattgaagtttgtcttgcagattgagaaggtgaacagggggctctcattgaaggtgacattggatatttacttgaaggcattattcaagagtatatatgataataatatatctagtattaaagcaatattaatatacgacctattatacgattacagtagataacctatataaaattaaatcgatattaaataattttctaattaattttttatgtgaccataatttactcattattactgtttactatgggggaatagatggattactaggaagagaggtcgatgcatcgataataataataatataataataataataaaatagaaaaaaaaagaaaaaaatgattacgtaacaaaacattacataatcacacacttacgtaatgcgctaattttgcgcttattataattccattccattacgtaatgaacaataagatcctattaaattcaaacggataaatcggaaccacggcaaaaaagctggaaaaagaccctcttttttttcccattcacttattaattaatttaagcggcatctctaatatccgcttctattcccacatttcctataggaggtaatacaccttaatatactttattataccttattattataccttattattattattatctaccctttaaattatctatttgatactatggccgtacgaaatgaacccttgttatttctattttaaattattttaattattttaattatctcattacctcatatttattctatatttaacataacgtatatccccatttcaaatcttctgcttctttctctgctgatatcattcatctttattattataccccctctacttccattataatatatctaatatcattattattatatttttaatctatctttatactgatgtctttctctattaatcattcatcaacaatgtctttacaaaactatcatttgacaaatcaaaatttattctatcaaaattcaataaatacttcagtacttccaccattatccgccaatataggcgcgtcaattaataattataatattaatatgaatatgaatatgaataatatgaatacttcaaatcaagttaataataattccttcaataattcacttaataattcacctagttcatcaatttcatcagcctcatcaacatcttcaatattatcatcaaattcaaattctcaatctgattcttcttcattaccttcattatcttcatcttcttcattaccaagtcttgattctgtattatcgcgcattaattcatctcatccattacctttaccgttattaaaaaatccatcatcatcatcatcatcatcaaaatcatcctcagtatcaccaaaatcatcaaaatcaaaatcatcaaaatcagatatatcggtatcttcaccaccaatacggaaatatcaatgtaaattatgtgataaaaaatttacaacttcaggtcatttagcaagacataatagaattcatacaggtattaaaaatcatatatgtccatttgaaggttgtaattcacgtttctctcgtcaagataattgtatgcaacattataaaactcatttaaaaattaagaataaagataaagataaattatcgaaaaaatcaaagaaagatattatttaactaaaaaatgtctttattcaaacaaatctctctattattatacccattttctatttttatttaaccccccctttcttctatgttattgtaattacgaatgaaacttatataattaaaataaaatataaaaatataaaataaaaatcattaaaaatcattaaatcatgccattgaaacagtgaaattatattcaagtactacagagctatacgactgaaatcgcgttactttttattcgcaaatttgctattaatattttgatttttcaaacttattttataaattaaactgttaatccactactattcctctcgtataaatctttggaaaactattattattagttcttcatttaataagaaattataatcttaaaccatgtcagtattaaacccatcattacctgtaagagaacaaatggaagcacttattcgtgcaaaacaattagaaatttgtaaaggtttagaaactttagatactaaaaagtttaaagcagatgaatggactagaggtaataatggtggtggtggtaaatcaatggttttacaagatggtgaaacttttgaaaaagcaggtgttaatatttcagttgttcatggccctttacctcatgctgcaattgaaaaaatgaaaaatgatcataaagatattcaagttgatcaaaatggtgaagttacattctttgcttgtggtttaagtatggttattcatccaattaatcctcatgctccaacaatgcatcttaattatagatattttgaaattttaaataatgatggttcagttcaaacttggtggtttggtggtggtgcagatttaactccttcttatctttatattgatgatgcaaaacatttccataaattacataaagatgcattagatccatttggtttagaactttatccagaatttaaaatttggtgtgataattattttaaaattactcatagaaatgaaacaagaggtgttggtggtattttttatgatgattttaataaaattgatgctcaaaaatgtttagaaatgtcagaatcttgtcttaatgcaatgttaccttcttatttaccattaatcgcaaaacgtaaagatatgccatttactgaaaaggaaaaagaatggcaacaaattagaagaggtagatatgttgaatttaatttggtttatgatagaggtacaaaatttggtttacaaactccaaattcaagaattgaaagtattttaatgtcaatgccaaaaactgctacttggttatataatcatgaacctgaggaaggttcaagagaggcagaattattaaaagttactagaaatccaattaattgggtgtaataatatatcatgtatttatgtaagtaatttgtaatgaacgttaattttaatgaatttagaaatatatcgatagagagtagaaatagaaataaatttggttacgtactgtgaaaaaaaaatattcaggtcaacagaaagcgtgtagcttcttcatgtaaaaatacacaggttgttgttttcaatatactattgaacaacggataacatcatgtcacgttcacgtgctaatactatagaagttaatactccaatacccatgatgatgacggtcgatgatgaaaatgaaatatataataatgataatgatagtaatgatattattattattgaaaaaccaaaatctttaattaaaaatttatacattcactatccaaatcttaatataataatcatttcaattattttatggtatatattatcaatgacgatatcagtttataatagatggatgttttcaactgaaaaattaaattttaaatatccaattataataacttcatttcatcaattattacttacattcctttcaataatttcattaataatattcccaaaatttagattaaatacaattattaacaataatagtacaggtgaaaaactcaattatataataccctttaaagaatatatttctaaaattttaccatgttcaattgcatcagctggtgatattggtttaggtaatacatcatttagatttattacattatcactttatacaatggttaaaacatcatcattaatatttgttttattatggggggttttctttaaacttgaaaaattaacttttaaaatatttttaattgttattgtaatgattggtggagtttcaatgatgatttatggacaaaatgataatcatagtgaaataattaaatcaacaaattttgtatttattggaattttattagttttaatttcttcatgtatgtcaggtttaagatgggcattaacacaaataatgttaaaacgtaataaacatactaaaaacccaattttaacaatgctttatgtttcacctggtatgttcatatttttattaattgttggtataatagttgaaggatttaagaattttcttaatgcagatatttggttaaataaaggtacattaattacaatcattttaataattataccaggatttttagcatttttaatgacaatcgcagaatatacattattacaaaatgcatcattacttacattatcaattgcaggtatttttaaagaattattaacaattttcgtttcatgggttatatttgatgataaattaagtttattaaatataattggattaattataacatttagtgatattatttgttataatatttacagatataatgaaaatgacaacttaatgaagaataatcaattagataaagttgataatgaatttgttgatatcgaaatggataatgttgtgtataataagtagatcgttacgtaatcagcgcttatcagataataattacctaaaagagaaggtcttcgcgatttttatcagagatcgtccaaattattaaatcgtcgataagtataagtaagaaggagtttaaagattgaagtaaaaacaatcagtggagaatttcattttactttattttattgagtaatggcgaaaaagggtaatttagattatacatatggggagacaaccagtaaggttgtaagtaagattaatgatgatgacggggatgataaaaattctgatgatttaatcataggaagcagaaaaagttcattaataaagactcaaaaaaagaaagatgaagaaattgagaggagaaataggattagggctaaagttaaaaaaggtaagtattttggatatgaggaaatacttgaaaaagaattaaatgaaggagaggaaggtaacgaagaaggatttgaggtatttgatgaaagtaaatggattaaatttattggatttttaacagttagaatagtttcaccattattactcatacttcatgcattatcagttggattagttttatggttagtatatcaatttgatttcagtgataaaggtacgttatcaaagagtaatgcaatgccatggatcatgggtacattatcattcaatgtatttttagttcattatgtcagcaaatcagttttcaagaatacctactataagaggcgtcctgtcccactatgatataagttataatacataatacatgatcaatttagtgtggggatagtacatagtagatttacgtcatgattacctagtgcttagggactgtatccttatctatactggacatttcctgaatattcttttatcttatagtatcttaatattttatcatatatcatatcatatcatatcatggactattcattatgcaagggtacctacccctatcctgtcacaatatgtgacattttttatacgctactccgaactatttaaataggtgtatcattcctctattaagtacattaacttatctatcttactttaacttaattattttaattttccttttttctttatcttatctatagacaaacaaacaaaactaaaaatgatgaaaactactactactaccaataacacaactgcaaccgataaggaaattactcaaaccactaccacttcttatttgaataatgatagaatcgatgaattaattccacttcctaaacgtaccgatatctcatgtttatcattgactgatcaacttataagtgagtatccaagtacttgctcttttaataatgtatttaatagcaatagtaatataaatacttccataattccaagatctagtggtgcattaactgactttaattctttatctaaaatgatgattaataaatataataatattactgctaaaccacaattaattaaccataaaagaattgcatcatatgtttttgcatttgatattgatggtgtcttggttagaggtccaaatactcttaatgaaggtgttgaagcaataaaatatttagaaggtaataatccttataacattaaggtaccttatatttttgtaacaaatggaggtggtaaacatgaatctttaagagctgaagacttaagcaatagattagaaaccaaaattgtcgaagaacaaattattcaaggtcatacaccaatgaaggaattaagtaatgaatatgataatgttttagttattggaggtgttggtgataatgttaaaaaaattgcaaaatcatatggttttaaaaatgttttcacatcaactgatataatgagatggaatccatcagttacaccatattatgaattaactgaagatgatttaaaacattgtatcaatgatgaagtttatgactttagtaaaattaaaattgatgcaattttagtttttgcagattcaagaaattgggcagcagatcaacaaatcatacttgaattattaatgtcagataatggttatatgggtacaatttctaaagataatttcaacaatggtccaagtatttattttgcacattctgattttgtttggtcaactaactataacttagttagatatggtatgggagcattacaagtttcaattgctgcattatataaagaacataccggtaaagaaatgaaagttattagatttggtaaacctcaaaaggcaacatttgaatatgcaaataaagttatgaaatgttggagaaaaaatgttttagataatcattttgaagagatgtcaagtattaataatgatgataaagatgattcaatgactgatattttttctaataatggttcagaatataaatatgctaataataataccaataccaatacaagtatgagtgaatcagatgaagatgatttcaatgataatgataatgataatgacggtgaatctcataatagtttaacatttgaaggattgaaaagaatgaaattgaatccaattgttgaaaaagttttaccaccaccatcaactgtttattttgttggtgatacaccagaatctgatattagatttgcaaattctcatgatgaatcatggttttcaattttagttaatacaggtgtttatcaaaagggtacagagccaaaatataaaccaaaacatcattgtgaaaatgttttagaagctgttaaatttgcagttgaaagagaacatgctaaagaatgtgaagaatggaatagagattcaatgttttagtgttattgcaccctttcaataatatatacgcataaatgcataataatagatttaaatatacattatgtaaaagacttttttatatacaccgtgggaaattttgtaacttttttacatagtaaaattttcaaaacccgcattttggtgcggctgtaaccattataattcaaatttgttcgattttggggctaaaaatcgtatgtttccctttgtatttcgacaatgtgtaagttttgaagggtctcaccggtatatttgggctccctgaaactaggagattctaaccaatcatctaactccaaattttgaattttattacgtaatcttgatgctttattacgtaatatccagagtgctgtgagtgagttgtcaatgttattacgtaatgaacaccaaattttgcggcgttaagtcaagttttttggagattgtaaagattatgtaagcaaaaacatgttttacgcgtgttaattaaaagtaatactgcattttggcgtattaattataaatttgtaaagaatgcaaagttatctggcttgtttatttcacgtttttcttgaactactaaaatattatagttgagtcatagcaactctaatgagttacacagacgatacacttctatttctctcttttttgagggaaaaagtaccatcaatactggaaacagacataacatctgtatcttctttcactattaaaaacgtgcaaaatattctttacaaaattatcaaatcttatcaggaacacaaaagggaacctttgagtgaaaaaaggttaaagcgttttgcagcaggtacaactttgaattttaattattactataacgagagatcagggcaagagaagtctagtgatgttcaatttaatgccgatattgataattttattcaaaataatatcaatgatgatattgagactcttgagaataaatatgggtctagaaaagttaataaaagaaaagcaaagtacatttttaaaaaattcaaaaatgcaaaactaaccaatagaggttctttactgggactcttaaatctatacggtttgaatcttgggtttttaaccacacttaaagctgctgcaagaagaagacttaaatttgatgatttggaaaaaattaaagaatcatcatttaatttcatgaagttaaatacgaagagagatcaagatattgcagatacattgaatgacatttttaaccgtttttttaatgaaaaaggctgggattacaatggtataatagattcaccatttattgaaataaacaattgtgacagatacgaatctgattacgttttaactaatgatgattttgagggtgctacctctgaaaatacttcatctgaaatgtcggtagataatctttcaatttccaataatattgatgatgataatgttctttctgatgcttatgaatctcctcctgtaggtgaattctctattaccaacgatgctaatgctagtaatattcattctgatgctcctgttttaatgtccgtagatgaattaccaatttttgatgcttatattgataatcaaattgatactcaggttaataatgtgttaccttcaaatgggtttaactccggaaattcaagttcttctgaagatagtggtaacgaaggtgataatgatgatgatgatgataataataatggtttttttagtgatgcttcagatttaatgcctgataatatgggtggttctaatgaatctgattattttggaaacagtagtgacgatgaggggggacctaatcaagatgttccaacagaaaatgatccaaatattatagaacaggagccagtagatgagaattcttgggaatatcaaaaaccacatttcaatgcagaacaatttgatgcgttcatggcaaataatttcaagagaatctttcatactgattgtgcttttcttgtttattggatgtcttctcatcactacatttctatgaataaagctaacattattttgagattcatgcattcttttggtttaattcaccctaaagatttagaaataagacgtctcaatgaaagagttttgaaagaatggagcaaagtaggtacatgtaaggatattgaattttgtcactgttcactgtgtctctatttttttgaaaataaagaccttcaagagcatactcttgggaacgaagttcataaaagatgtgatgcagaatcatttagatatcagtcaatcgttcctgttctttattcgctttaccaaaataaagatatcagaaaacatatggaagatgagagagagaaatattctaggaatactaatgcaattggtactgtttatcaatctgataaaatgcgtaggttttttgaagtaagcagtaacaatccaaatgagtttacttttaacatccatgtttcgagtgatgattgtaatattcaagtgaagacttataaaggaatcaaagttttttgtgtcatgtttatggatttgccagaaatgttaagatataaaaataattttattcatatgccagaagttttattaacaaaaagtgattcacctggatatactggtattacttgcaaggctctctccgaagaattaaatcttctttcagaaaaaggttttagttttattgaaaatggtcaggaaattactataaaaataaatttattatcgatgtctgctgatatgaaggcattgaataatgtattggaaacattacctcctagatcaaatcatccatgttctttttgcacaattcataaatcagaaaaacaaatttttcttacacctttgactaaagaaatgcgtcgtaacagacttgaagaagaaggtagtaataatggtaatgatggtaatactaacaatgaaaataacgatgttacatacactttttttgacgaaattgaagaaatagatgtggatgatgctgaaaatgtctttaaagatataaaagttacaactgaaatgtataaatcatgtttggaagaaactttggctggaaatgttacaacagattggagagtaaaggcaaaatctttagtttcacaacttaatcttgatgattatttcaaaattgtttgtccagatttgatgcatactatttatgagaattacattactaaaagagtggtgagcatttttgtttcaatggtttttaaacgtctggatatagcatcacataatttaattcttcaacataaaaaaaacctagatgaatatttggtaaaagttcatctatttgaagagattagggatatacccctttgtttagattcacttatgaccaagagtagagttaaagcgattgatgttaaagcttttacacatatttttccgttatatttcttaccgattgctgaagacattaaaaatgtgaatccgttaactccttatcaatttttggttaaatgtatgattgaaatgaatgcatatgctgttgctttgattgccactgatgttccaattgaatttgttgataataataataggaatgagatgagaagaagttttttgaaattgactttgaaattagaaagattatttcaaattcctgaatataaaccgatcttcgaaaaatattttcatgtaccttctcatcaaatccttcatttattcgacttgtggaaagagtttgggtcttttagggataattggtgttttcatacagaaagatgttgttgcacaattaggagaagggtgagccctcataaaaatagttataaaactacacaaaatcagttgacttttttaaccattgacaattgcaaaaacataactgaatataagtatgaccatatgagttgttattcgacatcaaaaacagcaaaagctcaacccgatgctgacatggaaggtgctctttcaagattgtatgctcaaggtgaaataacagaaggagaaagtttgataatcagagaacaaaaacatatccattcccgtaatactcatattagtaataaaggtgtaactggttatgcaaaattcagggtggataacaattggcaatatgtaaaagttgaaaggcttgttaaagttgaacttcatgatcgttataagttacttatgaagttcaaaaaagtgaatattgaacatgattggatgaaaacttattctgggaatttagaatttgcattatattctagaatgagagattccgatcttgattttgaatggatggagctgaacaatagtgttgaactgtttggtattcatgtttttgaagagtatgacaatattattgctgataaacatccagatttcagaaacgttttcagatttgctgccgagtaataatgtaatgtgttgaatatgttgtgtaattaatgatctttgtaatttaaatagtcgttaaattatatactttgcaggccttactattgaacatgcaagttaataaagttgtccaacagtgtgtgtcaacgttaaataatctgtcaagtttttaattcttacgtaacatttatttttacaattcaagcatgttgttgtttttaataatttattctataactctttactatttctaaccttttcttttcaaagacagaaatggagcaaccgtaagtacatctattgtttgttgaattagaaaccaccaatactaacatcgaattaagattatggataccatctcattcttcataccactttatcttttctaacaacaagattttcacaggaaagttgctgaatagtgtattcaaacgtataagtaattctaaattttattatatgctatgtatgacagtatcattattgctcaaatatgaatttttccctactattaagagaaaaagaaaagtttacagagagttactgagatcaggtagatgctattgcttaccaaaaatacttgtcaaattagtaattcaaacgattttagatgaatacaaagaattcacaacaattgatattgaagatatacacaacgttgaccctagtatgtatttagattccgaagatgttacacaagatgatggcaatttagaaaatacaactgaaacgaatcaaatttcaaccctttttaattgggctgattcgagtttggaaggactacagatacatgataataatagcagaaacacttcaatatttttgcgtaacttagcttcagaaattaattcgttatgatgctttaaaatcaaactatggttaaacacctcaaacacaattttaaagttagataaaatactttctttttatgataagcggttgtaattcaattaaaaaattgtataatattgttactatagtaagaaaaaaaaaagttataagtaattactgttaataaaattcgatataaagaatactgtaaattagtaaagataaattgaaaaaataatagattaatttaaatcgaaaaaaggttattaaaactgaaataatcatacagtcaaataggccaaattgtaattactaaactcttttaggaaattttcctttttaagaaagggtaaaccctcataatcacgtgatctttgaaaaaacctcaaacccttttgtgttttgacgcaaacaaatattattttcagccaatcggattcaaaattgacaagcttccggcgcttaaatttttttggatgttaaaaaaccgatttgttataaatatctgttcaattcccctaatttttttacaaaagcagaaattttgactctatccctttcttttccctttgttttagattgttaaattatttacaaatactgtaatctcttatctttcatttcaatttcttatcttttattgtatttttctttatctttcatttcaatttcttatcttttattgtatttttctttatctttcatttcaatttcttatcttttattgtatttttctttatctttcatttcaatttcttatcttctattgtaattctttatgtaattctttatcttctattgtaattctttatcttctattgtaattctttatttttaattatttaatttcttattttttatttttttctttatttccgattttcttattctttatttttttctttatttccgaattttttatttttttatttttttctttatctccgaattatttatttttttattttttttatctccgaatttttttatctttcgcgtcgtttttaaatccgcaatttttttggaatttatggcgcattaaaaattttgtaaatgcggcgcatgaaaaaactcattctcgaaatttgaaaatcactttttttttgtttacttttcaaaaaattaaagtgagtttctttactaaaattacatagcgcatttgttcatgaaaaaaggcaatttttgcttacgtaaaactaaaaaatagagaatcttattttttttaaaaaaatttcccacggtgtatatatataatataccttgctttttttataaaaatacccaataattgatgacaatattaatgatagcaaaaaaattaaaaaaaaaaatacatgtgggatttttccctccaaaagacccctgaaaatagcgaaaaactgttgcacatatagccaacttaaaatagcaagctattagtcgccactgtttaattaattttctccagaacaaggaaattttcccaagttccgcattaatctctcaactggccaaaatatggggcccttattaaatttctattaatttaattttccattgcatcaagtatacatgataaatttaaacgaatttacgcacagaataaatatttttttgctaaaattactaagtgatgattatatacgtagcactggcaaactcggcagtatgatcggtattttctccgttcttagttaaattgaaattgtccgttaaccccccctgttcccacttccggttccggttaaattattagtgataaatccgtaattcgattaattgttaatgcaccttattactaagtgtcaaactttactaaaagaaaataatagaagagtgttagacttgaacggacaccgataattaaatcttcaggttaaaccatgttcggccacacttaggggtttaatgttacctatataatgttacttacactataaatatattcaatttaatatgtaaacaaataaagtaatagagttagtttaaagctctcaagtaaaaccgtccacgtttagatttgcagtatctatcaagatatgatacagtatcaattaaatttcctgtttcaattgtggagatttgtaatctttagaatcactttaatgtctccatatgtaaagataataaactatcaaatcaaaataattatcaatttagcaatacctctaaatttgctgcatagaatatctcgcatgatcccattaatttttttttttcattctttatattaaaaataacgctcactttaatatagatcacattgtattgtgattttaaattatcactattatcaatctattgtgttcgggatttataagtaactagacatccccgttttttttcaattaaatctttgatatgtaaattaatgataaattgataccttaactgataataattacatcaactaatctaatcttatcaaataaaaggtttgaaatacctttaaatataatcataaagtgtggtatttctccttaattgctacaggagcaacccatccaatataatttatatacacaaggttgtgcaaattatacgttaacaagcaatatatacaacttcaattaataatcttcatttaccaccttgttgtcatttcgtataatagtttcgaatttcaattgtgaaataagactctctaaaatatataaatatcaccaagtatacgtttactcaattacttaaaactcaattgactcatttatatcttcttagaaaaaataggaagtaggtgttcattctttcaaattgaactagtttaattaaagtttagatcagagaaagaaattaactgtaatatcttatcaatactattgttaataactgtttcatacataaattacatcttaccattcatttatttatttactcacctattagctcgtttactcaatcaatcatttaaacattcattctttgatcaactcattcattattactttcagattcaaatatatcaaatgtcgaaacgtaaagaaacttctgattctgaagatactgaggatactaaagatactgataaatatgctgaaaaatctacatctcacactaaaataaaaagtagtaataaaaagccatatcaaagaaaaagagcatttagtaaaagaagtaaatctggttgtttaacatgtcgtgaaagaagaattaaatgtgatgaatacaaaccagtctgtaaaaattgtgttaaatctagaagagcttgtgcttatccaaatccagatataaaaaagcaacaaaaatttaatagaaattattataataataatgataattataataattacaatggttatccaaagaactcacctataagttcaaatgatttgaattctaaatcatcaatttcacattcacatcaatattattttgagaatgttaataataataacaacaataatcaaacttatcaatatggcccttcaaataatttactttcttatcaacaatatagtatgactccaatttatcctaatcaacaaccagttttacaacatccatttatagattcaaatacaaattttaaaaataatacaaacccaaatttaagtccaaatttaagtccaaatctgaatataaatacaaatgcaagtacaaattcaaatggacaagcacctgtacctatatcaagacattcacattcaaattcaaactccagtatcaacataaatactaatcaaactttatcatatattgattcaaatgctcaacagtattatcaaactgatcccagtttaacttatcctacaaatccaccaataaatgattcatcaataccacaacaacaacaatattattcacagtattctgatgtttcatatggtggctatccatcaagtataccaccaccaacatcatcctcagtttcatcatatcaatcatatacaccaatgtataatccaccaaaacaattcccatataattcaccaataatttcgaataacaataatctacctgtttatcatcaacaaattaataaatcaccaaatcaaaccccaactcaaaccccaaatcattcacccaatcattcaccaatttactccccagttaaatcatctaatggattccccatacaaatagttggcaccaaattatttcctaacattgaaacaaagccgaattcttaaagtttgattatagtctacaactttactactacttaaacacttatgacacttataataatacaatcttacacattccatatatacatatacatcacataccttgctttgtcaccttacgcttaattacaaaatacacggtatgttgtattcttatatggatcttttgcttttcactcttataaaaatcacaagaacacgttttatattttatattttatactttatactttttccatcatcttttgcttcttacctttttaatgtttcctctctccaaaattaatagacacgatagacaatcaatataattaaataacacaaaaattaatcgaaactgaaaatggtagcaatcaataattgcctaacacgcaccactatacttgcatgaagcagccattattttcatcggtttttttttaaattaaatttttgctctcaggcttaccgataattcataatccggggatgaatttccgctgagggatgatggaatttgaagattcaaagtatcattaaagtgatattcactaactcatttaacaatttatttatgatgaaattgtttataatattagtgctgatcaatggaattaattcgttgaaaataagaggtgttcctgataaatatgcagaggattataaacctgatgaaaatggtctctggagatgtttgagtaaccctgaaattatactgtcaattgataaaattaacgataattattgtgattgccccgatggttctgacgaaccaggtacaaatgcatgtgataatggtttattctattgtgaaaatattggatttgaatcaaattttataccaagttataaagtaaatgatggaatttgtgattatgatgtttgttgtgatggtagtgatgaaattgatggattatgtgagaataaatgtattgaaatgaaacttgatcatgataaatatgttaaggagtctaatgaaaatgttactaaggggttgaaattaaagggggatatattacagagatcaattaatgaaagaaatcgattagataatgaaattcaaagaagtaacgataaattaaggaaactaaaggaaaatattgaattactgaatattgaaaagattaaattaaatgaaaatgaaaaatttttattagaaaagtttgatattattgaaaatgatgtcgattcattatcatcaagtttcttaaattcaatgaataaaatgaataattatgtttctaaattagaggatttggaacatattttacagagaatgacattagaatataatcataatttcaatgatcccgctgttaaagatgcagctgagagttatttaaattttgcagcttcaattgatgatgataataatgcagaaaatacagtcaatagggttaaattatctgaaattataggtaattttaacgaagtattgtcaaggacgaaatttgatttaaacaagataaaggaagaaatgatccaatttacaaaggatgataagaagaaggacaatgttgaaaaaagtcataatatctgggatatcattcttaatagctttataggatatttcgaaaatgttgatacgttggaaactgttgaaaatttatctgatgttgaaatagataataaaattaataaattgaataaagatattaaaaatctaaagactaaaatccgtcaatctgagatcgaattgaataaaaattttggccctgatgatattcttagatcaatgaatgaatgctatactaaaactatgggtaaatttgaatacaaattttgtccaaattctaagatcgagcaagttgaaaaggatggtaggacaatgaaaattgggtttttcaatgatgttgaagttatcgataatttaggtaaattcaatatcaatttcacaaaaggtgagagatgttgggatggtccaatcagagaggcagtagctgaattaatttgtgatgttaaaactgaaattttatcagtaactgaacctcaaaaatgtatgtatcactttaaaatttcttcaccaattgcatgttttgaatcagatttactataaataagagatactatttagaatacaattataatatttaaaatatttatttaatatataccataacagatgtaatatcatcaggtttaccaccaatataatcttgacctgctaattcagttaatttttgtgagaatgcactcttgaaatttgtatttaaacttaaaacagttgtttgttgaactaaaactttatttaaaccacctaaagtttcagataaattaacctcatcatttgctgtatcattaagatataattcaatatcatcagggaaaatattatcaatcataccatcagttgtgaaaattactatatcacctgattctagcccaaatgaataattatcggattcatttggttcattcattaaatactttgaacccctctttttggcatcttccaagaatttttcaggtataattgataattgataaggtgcattaaaataataaatttgttcatttgattgtttaacacatttatattttaaagtatctttatctttacggaaaactccaaaccatgaatcacctaaatttagagcatttaaactacctgatttaccatcaattataccaaaacaaatagttgttgaaccaactttcacattaccttcagatttaactaaatcaaatgcatcatttaaaattgttaaaggtttttgatttggattattcaagtataggtaagttattttatttgctaattctctactaattgcacttgaatcaaatccttgttcagaccaaccaccaacaccatctaatacaccaataattataccaatttcagtataagctaaaatataattatcctcaccagttggagattcaaatacattatttgcatttaacagtttaaaattttgtacaaattcaccttcatcataaacaccatcatcatttgatacatttttttgtaatctatcttttggggaataagcaactgatacagtatattgtaaagttgaatcaatgaatcttttagtaaattgttcaccatttttaaaactacgaaatcttctaaatgcttcatcagttgatgatgaggtgaaattcctaaatgtaatcaatgagttaattgaattgaaattaaatttttgtttatcatttattaaattattattatttgattgatatgaaatatttactttagttctatgtttatttctatttgaatggaaattagctctttgtgagaaagtatattttattcttaattttacagcattatgatctgataacaaagttttattaatgatcttttgagatattgaaactattcttgatgaatgtgaatacattgttgttataaatgaatttgatgtgatggacaggttttttttaaatgaagtaatatattatcgggattaattttcttactgaattttaatgttgataagtgtagtatagaaaagaaaaaaaatgtgaatgtgaaaccaaaatatactcagctcaattgtctttattatcaatttatgcaatgaattagggatgatacggtagtgatatacagtacagaaatcaaaagaaaaagcaaataggaatgtcctgtcactttacaatgtgtagcggaagaggtagaaaatattaaattctgaggaatcatgttagatttaaagtggagtaaactaaaattgtaataagatttaaagattatattgtattaaagtctatatattatattgcaagtatatatgatacaataactatatcaataaagtgaatatgaatgagtatacgaatatgtgtatgtatgtttattttgtaagaatatgaaaaataaataaataacttaaaataaataaatcaactatattaatcaatcaattaaattaattttctaaaccagcaattgcagattcaatagcttttgcaaaatctaaatctggattttctaaatcaaatgtagttgatgattcaacctttggtggatttaatttcttatattctgccttagcttgtgcaattaagttaagtttcttttgatattctgcttcttccttcttcttagcagcttcactctttaatgaaagatcatgagagaaaccatagaaaacaccagcaactaatgcaccgtatctaaagacctatattataattatagttagtatttattctatatcatttccatcattttctaataagattaaattatgaaaaaaaaaccaaaaccaatccaatacatacgtttaaagtggaagacatgttgattgttcaatgaaacaggtaaatattgaactctataataagttgtgaaaaccatccaattgggaaaccttttcaatttttcatgaatttttcgcttctctgagaggatttcacttcctttgactttctatttgctgttgtgtggatcaattgataaagggtatttcaccttttacacttattgtatggtatcatgtaattgtatatgctgcataaaattgcttacacaacatatactatacaatcatacgagacgttactctagattcagctacctttagtagaaatttctaattatacatacacaatgctacataaccaaaacacttcccaataaggaaatatcattacgtaagactatctctgttcatgaatctgagtttctaactgatcttaagacaaagttcttgatacgatccttctctgcacgaatcttctcttgttcatgagcaaggttgactgcaattttggtattttctggaattgaaagactctttgcttgaatctttttaccggatctagccaaaaatgtaaatttcattgatttattttgtttgttgctaccattattatcattattatcagcagctgtaaatgtagaaagaccaccaccttcttcttctccaccctttcctaaattaaaaagaattgattcaggtgtaccaagtttttcactcaatgtacccttctttaattgcattgtagtattattttgtaaactctccttcattattttacggtattccatatctaattcagcttctctaaatgcttcatttctctccttttcactttgtatttcatcatcatcatcatcatcatcaaagtctacatcatcatcagaaacaataacatgtttgccttctactacttcttcgccctcaccattaccaatgatactatcttgttccttatcattttcttcactactatcgtcatcactatcatcatcatcactatcgctgtcactatcactatcactgtcatcactatcgctatcactaccaactttaagtccaattatcttattaacatcatcatcatcaagatcaccagttaattcgcttatttcatcatcatcatcatcatcatcatcatcatcatcatcctcatcttcatcgttatcagcgtcttcagtagcaatattactttcttgtttaccatcattagatccttcttgtgatgtttttgcattgacagcgttcccatcgttttctttaaattcactttgaagttgaattatagcatcttcatatgattctgccctagaaaactccacaccatttggtaattcaaattcattcaaatgtctaaacatatcagccaatttattggaaacatctatacttaatggatgttccttagtaaagatataataattgaaaaatctcataaatttaataaacggacttaattgatgtagaacatgttgtgcataaactcttgataaaatttcactaaccattttaatcctgaaaaaatcatcaaatccatcagcttcacaatatgtatctctacttgggtacttattttcatggccataacaaacaatcttataaagcattggaataaggtaagttcttggaataactttgagattgattagttcaatgaaataaatgacttcagataatctttttcttaatgactgataatcattatattctaatccagttgttatatcttcaattaattgatcaaccacaacagttttcaaagatttattacaatttaacgtaacatttctgagaacagccgccagaaatttaatatcaatatagttcatttcactcggatttgaaaataaaatttctattcttttgtaaataatttcattattccaatctgcacatttgataatattagaaattaatgggaaagttttcaaattaagttgcgtttttaccatataattaaggaattgttcttcccttagtaattctaccgtattctgtgatttaaccttaggtggattcaacgataaaaggaaaagtttaactgcatatttatcagtatgcgagaattttttagttttgtataattgttttaataaatcaatcatttcctttgtgtgatctttatattgttcatcatacaataagcattttgaacatccttcaaacattaaagataacaaatcaatattattattcacctcaatatttaaaactaataatctaattttatgaaaaataacatgaataggtatcattttaaacttaatcaactcactgaaaataataatatccttttctgcaacactatcatgacgaatttgaaatctaaaacttttatctaatcgtgtaattaaatcttcgatacatttatcaaaataaacagcattgattttcaagaatctagcgatattcttgaatttagaaacttctcttaattcaatgatatatttacttaatctatttcttgaggctttattacttaacccccattcccaaaaatcaacgactatatcatcgatatctttagcagtttcagcctcacctaatcttaacataatatcagcaattttattacctttaccatcacttgctaaaactttagaattcatattttcaattgcttcctgtgatactaatgattcaattgttggaatatcttcataaaactttttaacatcttcgttttcccaaatttgattgacatttgaatcagttgctgattttgtaaccaatgtgactttagaagattcctctgctgatttattgatttcatatttaggtaaatcaataccaacaattgggcaagcaaattcacaaaatgtattgaactctttcagtatctcttcaatttcttcagcttcattttccatattagtaacaactttaccaatcttaattgcaattatatttgcagttgatttaattttatgaatagatttataatccttttcagcagttttaacagcatttgtaacatatgatttgaataattttctcaaaaacactgatatactttcctcatatttgggattaagttttgaatcactttcatataacatgaaactaaaccttttcaaaaatgatgtcattataggtaatgttataccagagttaaattcataactcataatttctttcataatcgggattataataggtatatcatctttaccagcaatttttaattttttcaaataaggtggtaactcatcttcaggcatatcattcatatttctgaaaataccatgcaaataaaattccattgccaacttcaatagatttcttaatctaaccattaattctttttcttctttctttacaagtctgtcttttggatgaacaaaactatgcacaaaatacaattcaacgaatggtgtaaaagatgttgtaaaacgttgatgtaatgctgaaacaacttccactgtcgattgaacatcagcatttttgactttagttaatgattcacatagagcagctgaaatttcattaatatatttctctaatgaagttgtttgaattgcatcaataaattgtttttcagtttcctttgtgatacctgatctgatctttttgataaatgcagtatttttcttcaaacttgaatcaagtttaccctttagtttgaaaacattttcctctccattccatgctctagtattaagatcagaaagttcttctcttcttatttcactttcattactaacagacattctatattcctaaaatatctttgccatacacatgtatgtctataatatagttgcctttacacttggaagttataacggggaagttataattggtgtgagctgaagggaaaaattcagtattaaaaacttgcacagtgccaattgcgacttcaacgattaaatttattattaggtaagcgtggctctattaagatgctctataagaacccttttatcacatttcgataatatgcaatataatggtatcaatacaaaggcttcttttttccaaactaaaaagttttttccatacaaatagaaagagtaaaataatttttgttataaagtttctatacaatttaagaaatttggttaataattaaattacttcaacaggaaattcaaaggattcagaatgtgattttttggtggtaacggagaatttaattttgtataatcttgcaagcatacatgtttgaaatgatggtactaaagcaaatggattagctgagataaagtctgtgttgaatttaattggaatttcatcagtgtatctataagaatttgttttttcacaataaacccatttatcagttaaatcaatggttgtgcttgtaaaagtattataaataacaaattcaacatatttggtactagctaacccttttaatgtttcaaacaaagttttagggactcttgaatcatacaatttcatcatatcgcatatcttgttgtaatatagaataaacttttcaaatttagttttgatggtttttggactattgagtaaaaatgatttgtcaatattgaatggtaacttatgaattgacgtaaagtctacaccaattaaatctggttttattgtaactgatgttggcaacttagaagatttggtcttgggaagaaattctagattaacatttaaagaaaatatttgattgttacctaaagaataaattgaattttcaagagatttatttagtagttttggtaaaaagctttgaatctttgttgatctatccattgaaatatgcatattcatagcaccatcaatttttgaaaataaatcttttttgaacacaatagtgttttcagatgaataatcagcacactttaatttttcattagagtaagttggaatttgatcagatgacccagagattgatttggatttaccattcgagctaaagattatttcatcttgttttctaatatctgaaacaccaatctggtttaacatgtttctttcagataaaacttcaattgcttcaatagcttgtttttcatatctttcaatttgattgttggttgtaccgttggtgaaaacataatcatcaggatctgggggtgattttccaaccctaatgtaaaattccctgtttttgataaaaatataatcatattgatgtgtagtgtttttcttatagaaaggtttatatgcttctaaacgtgtaccaataatttgaacattaatataataagagacatattcaccaccaaatgaataatccttaacatgaattggggaaccaggagtgtcaagcctaccataacccagacttttattgatttcaattgatgctgcagtatttgagaatgaagaaggattaaaaccaaatgaaggaggcgttttcaagtgttcagtcaattgatgttcacaacaatcatctaaaacatagtttggaattttgaatttgaaaaactttttaattggcacacctggatcaagtgttcttttttcaaaaccaacataagttttatccaaagaatcatacaagtggcatgtatcattatcaccatcagcacctagaaagttaaaggaagcttcaagatcataagttgtcataatttttttcttataagttaaatttttattagattgctttacaccgatttcacattccatagatactaaaagcatttcaaaggggatttgtgttttggaattattttcaaaaataacaaatccgtaaaccatatcaccaggtaaatattgttttaatggagatctttgtttaaaaggctttccaagaagtggcatttcttcagttaatttaatagtaacagagaaaggtaaattaattttttgtattttatctaaattgttcaataataaactacttggatcatttaaagtataatcaaaagaatcagcttgggttggagtagtagataacccaattgattctgatgagctttcctcatattcaggaggtccttgaccaacactataaggatcaatcaaagtacggttaaacatatgattatgcatttgaaaggaaggcaaaatatcagttaagtaatctttttcatcaagttttctttcagataaagagatatttttaattgattgactaccagagtcatcaatgtagattaattgttcattgtcattagtatctgccacattgacagagctattggtattaatgtttgaattcattattagtaatagagataggtggaacgcgtaaagattgcctttggaaaagtggtagcaaaataatttttattttgtaataataataaataatctatttgaaaaacagttataagggaactcaaatgcttaaatacctcaatcagagtaattgaaactaagagttaaaagcagatataaagaagatatattagtcacattacaactttcaaataaaaagtttcactttaaaccatataatgtttaaatactaaaattgacaagccttcaaatgcgaataatagatttaagctgaaaagggtaaagctactagaacattctattgatttaactgttgaacaatataaagttaccgagttgatatgtcaatctatccgagagagactacttttcacagaaaagtaccagatatcgggtggaacaagataacaacaataaagcaaaaggtcaacaactgataagaacaataaaaacaggccaatgactcattatataacaagataaaattttgggaagttattaccgacggaataacgtcttttttccccgaaaattatgaagttgttggaatctgattatatctttatttaagttcatcttcatcttagcattactcttatcaatctacatgaaaaaataatgttttatagggaaatcatttacaaattaaaagtgtaaactatgtacaaatattcaatataatatataattttgattatgataatataatatgatataatatactgctaaacgaatagatctagcagttatatgtgtggaagtcagtctaattttactaaaactagaagctatccctagagaaaattctacctgctggtagaccatattcttttctaacattttcaacattaagatcccaaacgcttctccaagcgtgagcaccaactgcttgtaatttattattttcaacaaattctcttatttggaaattatttatattctcaattttagatgtttcttcatttaatttaccatcttgtctaaatatccaaactgcaaacctttgtttacctaaattcttttcaggtgttggtggtaagtaatctacaattgaatattgtggatttgaatctaatttttgtatatcaataattgaatcattgtttgaaagttcaacatcctttaatgcccaatgaagtgtggttgtataactgttattttcaacatctggagtatctggatttacaattaaaattgtatataaatcattctttgattccttaaattctgtgattttgaaaattggtggttttgatgtaacattacttgataaaattgaacctggttcaacccaagtatcaacattattatgtgggaatttcatatgaacatcaacttcaggttctaaagttggtaaagtatctggaataatcgataaagtttctaatctttgcattgtaatcattttattataactttcccattgtttctttgcataatgtctataaacaggttgtgtaagatcaatagtatttgctgcatataatgaattatatacaacttcaggattgttaatttctgcttcaactaataagtcattaatttcttcaacattttcagatcctttcttctttaaatcttcaattttactatacattttttcactctctttctctaaaatttcatatgctaatggatatattttatctaaatctattggtgaataatattttctctttgatgataacgctttaagtgaaacaggtccatttggtaaatctggtgataatacagctttttgtaattttgcatttttaatagccaatgacttggatctattggtaaaattagaccatatacctcttgaaacactagatgacattgcctttattaatatgagatattactatatattctactaaagtgataaaaactttgttaccttctaccagactctctctcccttaagttaacgaaattcgttgaaaaattccaaagaaaaaaaaatacatgttgaaaactggtgcaaaggttttaaatatttccacttttggcaattacgtaatctttaatatcgattttctacttctactgttaaatgtactcaaatccgaatgatgatgataataaaaaaacttataacattttcattaaatctaaataaagaagttatatatgcaaatgagtatatctacctgattagatatatgtatgtatttataatgcaaaatttcaatcaatagtcgttgctagttgacatactatcactgaaattaatttcagaatcaaccagaaatgattgtgaaacatccatattatgtactattgatgtaacagattggttggtattaattggagtattattctctgtaaaatgtgatgatgatacatctgataaaccagaaaaatctaatgtattggtatgttcattttcgaataatattggattgttattacctttcaactgaatttgagaatctgagttattcaagtatttgaaatctgataataatgtactattactagcatcagttgaaaaactgaaattattgttattaaactttaatgtattaccttgatgattaaaattattttgttttttgttgctagaattgattacattatcagccggtgataatgctatatctgatggagtaaacgaatctaaaaatggcatgctaacaaatccatcaaatgataatggtaatgccataaaatcaatttgattcattgatcttgatctagttcttttatgacctcttgataaattcaaacttgcattaagactcttttcaatgttcaaattgcttgggtttaaatcaaaatcatcagctattgttggtatattatttgacactggtatctgggatgttgcattcggtaaaaaataatgctttgaatctgattttacagaatcttcgacagaagcattattgaaagatttatttgcaggaaaactgtatgtattttgatgaaccggggttaatgatgccttagattgcaattgtatctcagatttgcttctaagtgaattactgtatgtttgagtagcattgaaatgaagggtgattttttttaattgatgatcctaaagttgatacgttcatattgagcctttgaacagtttgtttaacattatttgatgaagaagcactaggtaacggaattttaacctcattttcagacagcggtgacactgttcttgggggattggtagctgtttgtgctttaactgtattttcttctttacgattgctgttattgacactaaaagtatgtagttgtggtctattatttaataattttaaatcgtccaaagttaaaattggataatgtgtaagaatttccactttgtgtatttgttttaaaatcccatataaaagcgtgtaatggctttttgaaatttttgaaatttagtaaatcatcattaataagtaaagtatgtgatatttttaatttattaaaacgtgtaccatcacaaataccattatgatagtcatttatcaaaccagcccataattttgcttgcagaggtaaaataatcttaatagtttgtcttgcatcatcaataaaagaagcatttataggatcacatcttttaattagtaattgatcatcattataaacccttgtaattgatttcagttgaataattgaagtaaaattgccatttttaacagagtttgaattatagttgaggaatttattgaattgtgaaatgtttaaagtaacttcaatatatgaaatcatttgatcatcatccatattgacacttatagaagagtacaacgatattggaagttcagttattgaaatattaagtgaatgtgatttattgttagtgtcagtgctattagagcctttctttgaagtgatggttgttaaagaatctgaaatcattttaaataaatgtttagatgtattcagtttatttgtgactgcatggtcatttttttctttttcatagttgttaatgttagtaaagttgacaaaagagaccctcttacattttacatcatcatgttcccttttcttatttattaaagtttcaattttcactgcatcaattgttaagttgctggaaagatttccattactcaaagattcatccaactctttagaagaagtattatttataggtgttgatgatctcactagagagtgattatgaataggttctagtataggattggtgaatgtgttggttgatgatttcggagttgataaggaagctggtatagatgacgatattggtgtattagttgaagctgcatatgatgatgatgttagggatgaaagtttgaatactgatgatgttgtggaagaaaatgaatcagactttggtttctcggacttaggtttaaattgaatttctgattggttaaatatttcaaatcgtttgatatttgaaagtttggtatcattttcattatttgataaagctgtattctttttcgttttgtttgttagtccctgaaaattataatctctacttagcttttctagatcattattgaattcctctttgcgtaattttagttttaggtttggccttctctttttccttcgatttttgctttacctttgagttcgttttcatttgtgggttgatatctgtagtattacttgttttagaagaggccatagctattggtactaatgtttgaccatgcagtgcaggaatgcgacgataatcccaaaagttcagaatgctcggcaagtaaattaacttcggagttgatgcatgttaaatcatttttgtaagtttttcgtttattataacatttcctacgtttattagattcagctaacagtttattgacttcagtggtatagttatcgttgtttagaaaagatttgacttctggatctagcctatcattcctaatttctgctaaataatcattaaccattttagttttcaaattaaaacccatttcattcaagtaacacactaagtaatcagatcttggttgtacatcagcatcaaagtcagttagaaccacattatattgcctaagaccaatagcaattgcattaagaatttctgccttttgtattggagcaacatcattggacatttggtgattgtacttgtgattgtgatcttgataaaataggatttggaattattaataatcggggaaactatagttataaaagattgattgggtagagttgttatgattggtttgctattgacatctaagattcttgtttccttataatttagttgattttcagtattacttttatcagtttttacatgctttgttgctgccgctgctgcttttaatattttctttattatcagaaagatctaatgatgtgttttccatcctagtattgttaccaaacataactggcgagaatttgaacgaagatgatgaagaagaaggttcatcagcatatgatgacttcgttttcacaaaaaattgatgattcgtaaatgttggacgttgctcgttatctgaaggttggagcattgaaggagaatccattggaatagtcggagagctggaaaagtcttcaccattttgattgatccattcttgtttatcatgatcatcaagatcatcaaatgtataactatctgtatttttgtctctatggaatgggtcatctaacttctgtatattctccctgtcattacttgcaatctcaataacatgtttttgtttgagtggagatacatccaaaatctgattgaaaagatcgtctgaaattgagatatcgacgtcttttgacggcatgattgctggttgtaagtgaccgttgaatagaatgataaaaaaaggatgaatgaaacaaggtaaattttcaacctgaatgaatcccttttaaagatatataatttttttaatattgagttttcaaaggtgatacaataaaaattagtattattattattataatgatttgtagattaccccattattaatcttttgtaatcatcaaactgatctgaatccattactggagttggagtcccttaaacgcgacacgcttactaaattttttgttttatgatgatgtaatactgtcatcccttcctattcttgtgtaccggcccatcgactgcataactcttgacatatcgtttgggcttgttaatgctgcagtagataaatttaaacagtctttccaaattcagacccatttcacatgtcccttttccggttcagtttcacaatgaatactgcgtacaacttcttctgcaatacatgtcattattacttgcaagatatagcagattattgaagaataaaccaattttaacgaactccgttgttgcagccactcttttcgcttcaggagatgtcattgcacaatggatttcacctgatgagatagcatttgacagagttttgagaaatgctttatatggtggtattatatttggtccaattgcagctagaatgtatccatatttagctaaacatgttcattttccaagaaaagctaatgtaccagcatcaaattttaaagatacaactgttagagttgtagttgatcaaattgtttgggcaccgtttggtattgcattatacatgtcatgtatgggattaatgcaatctactccaattgatgatattaagaaagggttaaagcaagggtggtggtcaacagttactgccaattggacagtttggccattagtgcaaatggttaattttgcatttgttccagtagaacatcgtgtcattgttgtttctattgttggagtgttttggaatgcttacctttcaatgaaaagtaataaatctggtttataaaggttttatttgacatactttattttatagtacattttttatactttacttgtttctaaaataaaagcttgagttaagtaatttctttttataattctttttatccttcctacttttattaacatttcttttgttatcctcccttctttaatctaagaggaataagcataaaaagtaggaagagtagtaaaagatgatacaaggcaactgagccttcgaaaagaggagacgcgactttttgggaatttgcccttgaatttctgtcgatgatatgataatacagctcacttattattagcactcattttatttacgttattgtgatgtgtgataatatcatgttattgggtgaaatattgattgttttttttaaattaacttcattctagttacatatcgagctcttttcctttgacaatttcatatagtcaacaatgatgaagggattcaagcaacgtttccgctccaaaactggcagcagaaaggataaagatgagtctcctaaaaaggaaaaggacaaggaaagagagaaagataataaagagaaagatagagattctaaggaaaaggaaaggaaaggaaagaaaagaaaaggaaaaggacagggatagtagagaaaaggaaagagataatattagcaaaaaggaaagcaaaaataaagactttcaaacaaaatcagcaacacttgataccactactgcatctgttaatacctcaaacttcaattacgatcaatcaacccagcaaacttcaaccttatcaacttctaatactccaactatttcaattaatgattctacaatggataaggctaacattgatgtcccacaaaatgaaattgattttctcaaatttcatacttcacacacctccccatttgataaagtcccaaaggatgatttagagttaaaagttaaaactccacaacgtcattcatcttcaagatttgaaccatccatctacaatcaaccatttgaaaaatcaccaccatttgaagaagttgatcctcaattttatattgatttatttattcaaaaggttgatcaatgtaaaataatgtttgatttctgtgacccatcttcagatattcaaggtaaagaatttaaaagattaacgttacatgaattaactgttttcataagtacaaatagaattaatttcactgatgaaatgtataaacatgtcattgaaatgtttaaaattaatatttttagggcaattccaccgcctgttaacccaattggtgatatatatgatcctgacgaggatgaacctgtgtatgaattgagctggtcccatatgcaattggtttacgaattcttccttagatttattgaatctccagattttaataatacaattgctaagcctttcattgatcataaatttattctcacacttttaaatttatttgattctgaagataatagagaaagagattgtttgaaaactactttacatagaatttacggtaagtttttgagtttgagatcatttattagaaaatcaatcaataatatattcttaacttttgtttatgaaacaaatcatttcaatggtatttctgagttattagaaattttagggtcaatcatcaatggttttgcattaccattaaaggaagagcataaaatatttttaatcagagttttaataccattacataaagctagaggtttatccctttatcatccacaattggcatactgtattctacaatttttagaaaaagattcaagtttaaccgaagaagttattatgggccttttaagatactggccaaaaataaattcaccaaaggaattgatgtttttgaatgaaattgaggatatctttgagattatcgatccacttgaatttcaaaaaattgaaatcccattatttgcacaattatcgaaatgtatttcatcaccacattttcaagtttctgaaaaagtattatgtttctttaacaatgaatattttgtctcattagtgacagaaaatgctgagaatatcttaccaattattttcccatcaatgtatgaacttgcacaaccagaattgaatatcttagaaaataacaacaacaacagtaataccaacaataatagttccaataattcaaacaataattcaaatacaactaatgatttagatatagattttgatgttgattttgatgaaccaaataattggaatagaacgatatcaaccatttcatatagtgctttgaagatttttatggagactaatcctattgtatacgaccgttgctttgtcctatatgaacaacaattgaaggaagataatgaacgtaaacatttgagagaagaacattggaaaaagttggaagaatatgttaaaaatttaaaagagggtaaggttgaatcaaatgtagaaattaaatgattcccgttttacaagaaggtaccatgtttctttatttttttataaattggtgatatatagtctaaacatttattgaaaaagatagattttttttatgttgtactcttatattctctaagaataacaggaacagaagatggtggtaatgcaccaaattcagtgataattttttgaatatattcaggtggtgttaaatcgtataatacattaagaatattaagacttggatattgtttccaattactcaagtcattttcatcattcagacggttagcattatttgctgcattatttttagtattattattattattattgctgttgttcttattcttaccgttattagctttgttattcttttcattttctttagcttcacgttcttctaatttagtaatatactgttgtaaattgaaaccttttttattgaatggtttagtgtttatcaaatcgtcagagtctcctaattcatttaaagtcacagagtctaattgaactttatcactgaatttcaaactctcacaacaaaccaatacaggtatggacttatttcttgatgacatagcaactaatgcactaccaactcttgaatagagacgaccattagataacattgagtgagcacctaagaaacaaaaatcaatatttgatttttctaataccgaacttaatgagttaattagattgtagtgtaatttaatgttgtcgtatttagataatttctttgctaattttttaccttcaaataacggtttactatcaataatgtaaatttcaaactttttgttttgttcgactgcacaaaattcaaacaattcacttaagacattagagtgcccatatgttaaaatctttgagttattatggatgtgagtttgcgcatattcaatgataactttatctgctacttcaattttttccattataaattgttcaatttcttctgttaaaatttttttacaatcctcttcagttgtattgattggaattattgaaatcttttgtttcaaccatctaattgcattacccatagaaatacttaaaggtctaccagttttcaagtattcaatttgatgacttaaatgaccagttaaatgtctttgtaaactgataccttctggtgttttatatgagttgataacatctatgaaagctctcatcatttccttacatctactacttgatcctacaattttataagtggaaattttcaatgtaagggataaaatacttggatgaacaattgatgcaatctttgcagttgatgaaattctctcttcctttgtttctaaatgtccaaacattgatggtgttcttaaatttggattatgaattttagcattattaagttcttttttaatatgtgatacagttttatgacctttatccttatttttattgttttctcgtgaagcattctcctttaaatgtgctggtgttccagatgatggtgcattagctgttggggtagttgaattgtcaccttcagcaccacctgcagccttagcagctgctctcttagctgccttttcacgtttctttaattcttttaactccttatttgataatttcttttcatctaaaacagcggcagcgccagtaggttgtttctccactggcttttctaccttatcaacaggtttatcggacattagagagttgttattctaatgaaatgtatcaatgactgatgcacttgacagtacgatctttcaatatttagagaaattttccagtttaaatcaatttcgcaatttgatttttttttctcggaaaattgcaattctcaagatttttttttttgattgacatcgtcgacagtgaaaaatttttgttataacactttaaggaagtgtattgaactgtttctaagtgacttttatatatcaaacagcaagcaaatacacagttaaaatatgagtgacgaagctgaaaaaaatgttgagatgtggaaagtcaagaagttgattaagtcacttcaaaatgctcgtggtaatggtacttccatgatttcacttgttattccaccaaagggtcaaatttcaatcattcaaaagatgttgactgatgaatatggtactgcttcaaatattaagtccagagttaatagattatctgttttatctgcaatcacatccacacaacaaaaattaaagttatattctaatgttccaaagaatggtttagttgtttattgtggtgaagttttaactgatgaaggtaaagaaaagaaattaactattgcatttgaaccatttaaaccaattaatacttctctttatttatgtgataataaattccacgttgaagccttatctgaattgttagaatcagatgatagatttggttttattgttatggactggtaatggtgctttatttggtgcattatccggtaatactagagaaatcttacataaattcacagttgatttaccaaagaagcatggtagaggtggtcaatctgcgttacgtttctccagattgagagatgaaaaaagacataattatgttagaaaagttgctgaagttgcagttcaaaattttattacaaacgataaagttaatgtcaaaggtttaattttagctggttctgcagatttcaagactgaattatctaaatctgaaatgtttgatttaagattacaacaaaagatcattaaaattgttgatatttcatatggtggtgaaaatggtttcaatcaagctattgaattatctgctgaaactttatcaaatgtcaaattcattcaagaaaagaaattaattacacaatattttgatgaaatttcaattgattccggtaaattctgttatggtattgatgatacccttaaagctttagatttaggtgcttgtgaaattatcattgtttgggaaggtttagaagaagtaagatacacattaaagaatactgaaggttccgaagttattaagatagttaaaccaggaactccaaaggaagattatttaattgacaaggatggctcagaattagaaatcgtatctgatcaaccacttcttagaatggcttgctgaaaattataaaaactatggtgcaactgttgaatttgtcactgatagatcatctgaaggtgctcaattttgtaaaggttttggtggtatcggtgctttattaagatataaggttaattttgaacaattaatgtccgacgatgatgatgatgaatatttctccgattagagagtctgatgattcatgttttatatataatatactatatgtttcatttttctattttacttacttagccttctttactgtttttttttttcttctgtcatattaataatatactactcttttatgtatgctttcacttctcagtttcattaagaatactggagtttataccaggttaactaagttattaacacatattactataaaactttatacaaaattatttcttagattttttatgattctttaaaacagttaatgcatcctgttgaaggtatcccataacgctattacttccttcattagccagtagaagatgtgcaatattgtttaatccaccagcaatataagatcttctacctgattttctgataggtttttttaaagaatctcttaattgtgcctttaagactttaatattatttttatctaattgcttaccttcctttcttttacgatctctcttgagaaaatcatcttcaaaatcatctatattatcaacacctaattcatcagctgctttttcaatccaacttttttccttttggatagactgtgatgcaacttcagcttgggcaattttagcagataaatctaatctttcctttaactggtctaaaatatcactatcaataataattggtttgagatctgcaacattatctgtcttagaaataacacttcttaattttcttaaagggccagaagcttcttgaggagagcatagaacaacagaaacaccttctttacctgcacgggcagttctacctgacctatgaacatacgtatctgctgttcttggtaaatggtaatgaacaacgtgttgaattccactaatatctaaaccacgagctgcaacatcagatgcaatcaaaactgatgatgtcttttgtgcctttgctgtttctgagtttttggtgaatctttctaacgctcttaaacgttgtttttgaatcatagatgaatgtattgaaacagttggaatacctaaattacttaacattggtgctaaacgcttaacggaatcaattgagttagtaaagactaaagttgtaccggggaacattgaaacaaaatagtaaagcatcaagtcacgttccattggagcacatggaattatagcttcagtaattttgtttgcaacaacttcggtagggttaacatcaacatattcaggtttactacggaaacgtaactttttacctaatatttccaaaacttctctgatttctgcatcaccttcatcttcatttttacgtttcttagcatgttgaggttttttatcacttgccaatttaccaaataaatcttttgaaaaggttgctgaaaagattaatgattgccattttctttcaaattgatgaagattttttggtctataattatttaaaatttctaaaattttcttcatttcttcaaaatgaccatcttgtaacattctatcagcctcatctaatacaagtatatcaatagatgcaattttttttgccaaactagtagatttttcaagaagttccaaacaacgacctggtgtagcaactaaaactcttgggccgtatgataataaacgttcttgcttttgaatagataaaccaccagttagtgaagtgacagttttgtcactgaaaggtgaaaatttgaataattcacgtaaacttttcataacctgattagcaagttcacgagttggtgtaaaaataagagcagttgggtgttgacggatttcttctggcaagtttttactctttgcttcttcagctaatgctttttcaagaattggaataccatatgctaacgttttaccagaaccagtaatagcctttccgataacatctttatctgcaatagctaagggtattgaagttttttgaatttcggtaggttctttaaatccaagtttttgtaatccatttaatgtacatgtggaaagagataattcggcccattctggtaaatcaatttcatcagttggaatattgatatctgatacttgtgcaaatgtattttccttaagatcatcttcgtttgatgaagcttttgctttagcttttgttttttcagttttagaaactggagtttctgtaactggtaagtttggaatattaagttcattatcttcatcctttgatgcaataaatgtggacactttagtttctttcttctttttcttgatttcagcttctttttgttcattttcaacattatcttctgcgtctttcatatctacatcttcatcattttctttagattcttcggttttttcgtcttctttgtcgttttcatctacatcttcatctatttcttcatcaccatcacctacttcttcatcactggtatcattgagcgcttctttatcttcttctttgatatcttcaggatcgatttcaaattgaccactaggaattgtattttctctcacttgtgcatctttttctgagattttattagacttatcctttgttaaaaattcgattttaccattaacaattttaacatcaacattatcaatttcttctaaaccataaaaaccttcaaaatcatccaatgtatcaggtatttcaacaggtttccaattaagttcatttgctgaaactttcaaaatatttttacttaaagttgaagttgaacttgcttttcgctttataagttgttttttcattggttggtcagcagctttagctttagatgctcttttccttttaagaattttttcttttaatgctaatggtaccattttctaattgactgttcaccaaaagccagacaattaaggaaataaattcacaatcatgaaaaaaaaagttttccaataaaataatttttttataacatgcacatcaaaatttgagaatttttttttatcaacggttttaaactccagaaacagaaggatttgggaacaaacatgacgaaaaaaccacaaaagaagaaaagttcattgatatctaaaagaacagtacctataactgggaataaagaattacataatgcaccaaaatcattaaaaccattgagagcaagacaattaattcgtagatttcatgttttacttaaatacaagagttcaatattaacgagaatacgaaaattagtgaaatggtctgatgaaaaagatgggaatataaatgataattatatgacaataatcaataaaaagaaacaatatggcaaaatttatcaagatgaatgggacaaaacatggaatggattaaagatcaataaaaccccacaatctgtcattgatcctgatactaatgataggataagtaatgatacaaccgttgaagacatgattagaattttgggaaagattgactcggaaattaagaaaagaggaggtttagaaacatatcaaacagccagtacattaggtcaagacggtaaaagaggtggagattcaagtaaaatactagtgaaatggattaaagaacttggtaatgagataaatacagatacagcattagaaattgggtgtttatcatcaaagaatgaaatttcgacatctaaaatttttaaatctataactagaattgatttacacagtcaagaacctaatataattgaagaacaagatttcctcaagaggccacttccacaaatagatgaagagaagtttgattgtataagttgttcattggttgtgaattttgtcccaagtgcagaacaaaggggtgaaatgttatgtcgtatgtgtgatttcttgaatgaacctagatatgataaaaacagtttccttttctttgttattccattaccatgtgttgaaaactctagatactgtaacttagggacaatggatttaatatttagtaaattaggatttgaaaagatgaaatatcatcaaacgcataaacttgcgtactggttattgaaatggaaaggttcaaaatttgttgattttaaattcacttgtcataagaaagagttaagaacaggtaaagatcgtaataatttttgtataataatcaaataataagggaaggttatttaatttttggatattatttccataaaacacatatcactaaacgatgaagtccattggttatctaaaatatttccttttgttatgtttgtagcttttacgtcgttaaaataagctgattcgaaatcataattgatgataataggtttgtgttttattgaatttgttttctttctatttttctttttagttggtaactgaaatccatcatctactggtttttgttcggctgtggtatctgatttggtttctgatttctttagtataagttgagctagtcttgcacagtttaaagatttttcaaagaatttagcttctggttgtttataataatacaccattaaatcattagagagaatatattttggtttatattgattgatcaactcttcaaatgcaccaatggggaaatgaggcatgtaaaacaatgtttttccaatttccttaatttcaaaagtttcctcaactttaaagttaggtatagtttctaaataagtggtttcctcctttgtaaatataggatcccataaacttatattaaaattttcattttccttaaataaatgtttaacaaggatgttcaataatgataattgatacatagcatttgaggaatcagatattggacctaaacctaaacaacgaattgtagtgaaagaagtagatttatcaagtaacactttgtcaatagcagttttaatttgattcacaacatcagaatctttcaagattgtagttcgttcatctaaagtcttagttaatttgtcctgtgtcgtcattggtgttaaaatatccactttgaagatcactttgaaaacttcactacaatagaacttctgaaaaatttaattttttttggtgatctccgggaccatgtaatttttcccacaaagtttttattttgctaccagggttaaaggctcagctttttgctataaatttcttcatttgattattatattcatttttacataaagtcaaggatactttgcaatatgtcactgagaatgagattgagtatcaaaagataattatcttcaatgaaaaactgccaaatgaattgttaaaaattgatgattttgattgtaataatgctgtttaaaaaaatgctttttcaatgtttttgacagttatcaaaaggatgattttatgagtacaaacaaaatttagacaaatgcaaagatatttcgaaatgtgcgcttgatattataaaaagggaatttgagaggagaggtttgaaatatagacctatctatgataacttcttcccaaggtttaaaagaaagattgtttgccagcattatttctccatcagataatgatattacagagttacgtgattattttgaaggtaaattagatgatgatgatgatgaaaagattgataaaaatgatgacaccaactgcagtaaaagaaggagaattaaatagttgagccacccacctatattattattatcccacattagctaatcaagtgaaaattgaatgaaaaaaagtcgcaacatttcatttcggaatttggcaattacagcgacattttccgattttcatattatcaaacataattatgtgattggctgttatagattttgtttaaatgacagtggttataaggttgatatattgatatctacagacatatgagaaatgatttgtattataagcgtcttgaataatacattcaattggctgtatactaaaataaccgacatataactaccaatataaagagaaatactttcaagcaaactctaccatgaattgaaaaaaaattggaaaatagtgaaaattacccttttcagtgcgatttcccccgttttttgacaaattatttttcaacgattccagtaagagcatattattatagtcgattggtatattttattagtaagaaactttttacttctttttctttcttttacttttccttgtttcttttctctttatccttcaatctctctattccttcttattagttacaaattagcaagattaatttgcaaatattaagatacggtcaatatttaactcttgtacataataataacatcttcaatatttcatctcatttcacttcatttaatatattgacattctaacttcatttacacaattactatgtctcatatcgtttatatacccaaggtttttaaccatgattccaacttacctattccaaaagtttcattcgaaaataatacatgtcaaaataggttctagaaaatcactgttagcagttcgtcaatctgaaattgtatctgaaacaattacaaaactttatcctgaattatcaactacaattactaaagtttcaactttaggtgatcaagttcaaaatagacctttatattcatttggtggtaaagctttatggacaaaggaattagaaattttattactcgaaaatgtcggagaattcgaaaaaattgaccttatagctcattcacttaaagatatgccaactgttttacctgatgaattcgaattaggttgtatcattaatagagaaggtatgtactattaatatttcaatgatcacttgtttttttattttcattttcattttcattttcattttcattttcaacactgtttgttttgtttaaatgatgatttaaacatttttttagacgttagactactgaactttatagatgaaaacgtgttattaactgattattcaaaaaaaacagtttgaaaatgaaattgttttataactttacttttttttcttttgaaaaaaacaaaatactaacatcaacctattattattatttttttatagatccaagagatgccttagttatgaaagcaaattcaaaatataaaacacttgcagatttacctccaggtagtattgttggtacatcatcagtacgtcgatcagcacaaattcatagaaattatccacatttaattttcaaatcagtacgaggtaatatacatacaagattaaataaattagatgatccaaattctgtatttgaatgtatcatccttgcagctgcaggcttaattcgttgtaatttaggtgacagaattactaaatatcttgattgtgatgaaatgtatcatgcagttggtcaaggtgcaattggtgttgaaataaagaaaaacaatgaaacaatgcgtctattatgtagtgttattggatgtcgtgaaactacttggaaatgtattgctgaacgtagtttactaagaactttagaaggtggttgttcagttcctgttggagtttggacaactttaaataatgatattttacaattaaaggcaattgttttaagtgttgatggtagtgaaagtgttgaagatgtacttgaaaagaaaataacttgtgataaaaatgcctttgatttaggtattgaattagctgataaattaattgcaaaaggtgcaaagaaaattttagataaaattaattttaataaaattcaagaaattaaaaatgctggtctgactgcttctgaaactgcaacacctgaacctggtttatagtaatgattacaataatattggtattccaatctttttttttactgcttttaaagaaataatatcttatacaatcctcacaaatctctatatgtactctagtatttaacaaaataatttataaatcaattatgaacgaatgaaactttaaccttttggaaattcaattacatattccattaatctttcttgaccaaatactaaaccaaattgcgcttattataccaaacataccaataaacaaaaataagttaaccaaataaggatcttttgcccgaataacttaataattcacctaaaacactacttaaagcaactgatgataaaaataatgctaatataccaccacgtaaataaattggtgataattcataagctaactcataacatgttgttgctgcaaaacattcaccaagttgcctgtaatgcaaacattaataaataacaaatccatataattaatgaaacttcagattgtgtttcacaatttgatacattatctattgaacatttcgaattggaatatacactatgttgaacaattgcaccaaataatgtaccaattgatgtaatggtaaatcctattattattttagttcttggtttaggcaatgaattcaatttcattaattttgggtatataaaatttgaaagtaatggaatcagaataataattgtaattggattaattgcttgataaatatcatttggtaaatttaatggacttgacattgtagctgcaagtgaaatttgaactgatattaatgatgaatcatttaaataaaatggaatgaaaaataagaataatataacacaattgaaaaaatttatcaatatcatccttagtgacaacaatatctgcaaatgtagtatctaatggtataggagtttgaaaaatatgatttttcaaatgattgtaaaaaatagtataaacattaccatttgttgtaatattcttgtgatggatcatgatgtaatattcttggttttaaataattaagtaaaattggtaatgttgcaaataataagtgcagttgataaataaactacccaaaacccaaaaaatctttctataaatgaaccaaactaatgataatgtacacccccaattaataaaactataaaatgacatagctaagcttctctaatgttgctttatggtcaatttttaatttgctaccatttgataaatttttgaaatccggtttagattgcttatgttcatattgatctaataataatggtaggatatttgatttaatacatccagctgaaatagctataagtgcaactgaaagtaagatgataatatatgaaacataaggtaattgcataacaaaaggaattgatgcaataactaatgtaaaatgaccaattattccaataattgtaccaatataaactgatttaaatttacctaaataagtatcggcaatataaccacttattattggagatatatttgcaaagaaagttaaaaattgcattgtaaaagaagcaaatgataaacctaaatttagagcaccgggagtttcatttgatgtaattggatttatctttattgcaccagttattgaatttgttggaaatttcctttgaatcatgtttgttaaacaacctgatatcatatagtatgagaatctttcactaaattctactaaacatattaaatatgaaattttaggtattgaaccagttgttgtgggtatattttcatcatcttgggaaattatttgaaattcatcagttgaatcattaatgggtattattgatagttctatattatcttttgacattgtatattgagtgttataaataagattattacattttcataaaagaagtatcaataccaaacatgcttcaacttcagtaagttcttatcttgacatcgattgatggtatacaaagtttgcaccgccttgtttaagaagattacctttgagtttaccatagagaaaaattattctcaccatactatataacggacgacatgaataattctactgtgttatattaataaagtattggtatattttagtagagtaaatatattacaagacaaatacaagtataagtaacataaaacaatatggatgatgcagaattacaagcaatacgtgcagctagaatgcaagaaatgcaaagaaatgctcaaggaggaagtacaggtggtatgaatggatcaacaagtggtagtaatggtactagttctagtactagtaataataatgtaaatgatgcaattatgacacgtatattagaacatgatgctaaggaaagattaaatagagttcgaatggttaaacctgaacgtgttatgggagttgaaaattatcttattagattatatcaaagtgggggtattagaggtaaagtaagtgaagaagatattgttgaaatacttgaaaaaattgcagttgaagagagaagaaatacaagtacaaggattaaatttgagagacgtgattacaatgagagtaatattgttaaaggtgtgaataaaggtggtttatctaataatgatgaagatgatgatgatgatttctttgatgaataatagtattagattcagtaatcaatttgtaaatatattaaataacccttaaagtattattataataataataataatagtctacttaaattagtaactatctacaacaccttcctctttgggaaactcaagcggtagcgtaataaaattagcttacaccttcccatttgggaaggggccgcctatttcattggcgagataagcttgatttttcaatttttatacgtcaaattgttaattgatatccattattttaattttttcttatcaatttgtaaataatatttcactttttcactttttcacaatttcacaattttactatttaaagagatggtattcttaattttgtaaattagattctatttggtcttttattttttttatttatttagttctcttctccctttattaaccaatcaacagattaaactatacacacataatggctattcatccgttcgatcaaattactgatgatgaattaagaatcatcgtcaaacttgttaaagattcttatccaaatgataaacctttatttgctcaagttgatagattagatcctccaaagaaggcaatgattcaatatttagatgctgaaaaacaaggtgttgctcctccagttattccaagaagaggttatgcttatttctatattggtgaagctttccataaagttttagttaatatgacttttaaacatattatttgtgatgaaactttacctgatggtgtcattggtccaatggttgttgatgatgttgctttatttgaagaattatctgttaatcatccaatttgtaaagctgaaattgaaaaattatgtttacctgataatattcatgtcgtctgtgatccttggatttatggtactgatgatccaaatgaaaaaagattattaattcaatgttatatgtatttagcaaataaaaatcattctgaatcaaaccattattctttacctttaaaattctctccagttttcaatggtattactaaagaatttgttagaattgattatttaccttcaggtgctgatgaatttgttgttaatgaaactactaaatgggacgaattcccattagttgaatatcatccagatttaacaggtattactaaagttagagaagttaaacctttaatcatttctcaaccagaaggtgtctcatttactgttgataaacataaaattgaatggcaagattggactttctatgttgttccaaatgcaagagaaggtgcagttatttatgatattcattttaagggtagatcagttatttatagattatcaatgtctgaaatgactgttccttatggtgatccaagaggtccattccatagaaagcaagcttttgatttaggtgactgtggttttggtgttaatggtaatgttcttggtttaggttgtgaatgtttaggtgttattaaatatttagataatagaagagttacagcaactggtgaagttgaagttattccaaatactgtttgtttacatgaacaagatgctggtatcttatataaacatgttaactatagaactggtcataaagttgttgcaagaagaagagaatttgttgttcaaattattgcaactgttgcaaattatgaatatgctgttcaatatatctttgatcaagttggagaaattaaaatttctgttagagcaactggtattttatcaactatgccaattgatagagatgtcgatgttaattatggtactttagttggtccaagagttatggctgcttatcatcaacatttattatcatttagaattgatcctgcgattgatggtcataataatactgttgtttatgatgatgtcttaagaatggaagaaaatactaaattaaatccttataatgttggtttctacactgaaagacattatgttgaaaaatcaggttttattgaacaatcaccattcactaatagagcttataaaattattaatgaaaatgttattaatccaacttctaaaaaacctgttggttataaagttgttatgcctgcaagacaaatgattatggcatctccagaatcttttaatacaaagagagctaaatttgcaactgaacaaatttgggttactaaatatgaagatgatagattatatgcagcaggtgaatttactaatcaatcccatgatgatactggtttagctcaatgggctgatggtactgaaaatgttagaaatactgataatattgtttggtgtactttaggtttcactcatgttccaaaacctgaagatttccctgttatgcctgttgaaatgcatgaaattggtattactccattcggtttctttgaaaagaatccagctttagatcttccacaagcatctaatgctactaataaatcagttcttttcgaagaaaatgaaaaatctaaattaagtactactcaatccagttgttgtaagaaaccatcattataattgatttatcaatgatggaccccttttgtattttataatcaatcatttagtttttatttttttatatcattcctataaatattaaccataattaattcttgttattaatcaataactctatttaacacatagaaatgaaagctatcacaaattcagtgggttctgtagaagatttacccacgggaatctcagtttgtaacgggcagcttaattttttttgaccctcactaaaaaaacgtcatgaaatttccgttgtttacttctttatcaatatcttatagctgtgatattagttacacagtgaacattaacttaaagcaaacgatcaaggatgatcatactagttgacaatgttatcaaaatgtatgatgatccgatcactttatattttgactatatgatgtatgtatcaaatagaatacgaactttcgaaatattatcaacaagtgataaatcaattcaagaatatttaacatcattaaaagttaatggagattatgttttaggtaaatttggacctaaaactttccgatatattgtttgggatggtaaaagatatggccctgcattctctgcgaataatgaaaagatatttagaaataatcgatgtacgaatttatcaaaatctgaaaatggtggtaaacttcggcttcatagatctatgccagatttgaggaataagaatttaaatagtggtaataatataagtacacgaagtgaaacgtttcatattgtgcccatttttaattcaactgggattgagagaagtaagtttgttaagttatggagtgtttttaaagaagctcaaaatcattttaaattacctcatgaaataggcattgatccgatcaaagatctggttaggatattaaaatctgcaattaaacattttccctcgtcagaaataccatgttataacaataataacgattttggttgggttttgaattatttccttctcagtgaagatcaagcaaataatattatggttttatttgaaaaactaaaagaagataataaagcatttccgattgtatctgtttctgaattaattgcagatttacaaatgacagtctccactatcaaatgttcaagatttttaaaagattcaataccaataagtcaattttctcgttattgtattttgtttaaacataatatatttaattcagtacctggatcccgtaaagatttagttatattttggtcaaaggcatggaaagaatggatagaaacatcagatgatgagaagaagatgaaaatgttaggatctgttagtatacatagaaattgggcagatgacgaagaaatgaaattgttcattgaatcaagtgatggtagtgaggaagaaattgattggtttggtgatgaatcatttaataggtcaatgattagtcctgggcatgatagtggacttgaattgatcaaggaatctgaatctgaacatacatttactaatgaagagaatgatgaaaattatgaaagtttattaatgaatgataatgtaatgaagaattttagtcaaagtacgatcaattgtgaatctgatattctgatagaaaatgatgatgttgtagaatcaattgtactatctgaagaagatcatgtaattaaaaattgccaagaaattgctaatgattttagtgataagaacagagaggctgattttgtaccaaatgaagtattggatgataatgaaatgggtcaatctatggataacgacataatgtcatacgtatctgaagactcagaaactgtaatatcggaaactcttgaaacaaagaaaaatgaacaaaataatgatgatattaatgacaattataatgacaataacgaaaataaagaaaacaaagaaagtgagaatgataatgaacgtacaattgattcaactaaacttgcggtagaaataaaagaagatagtttcataaacccaaagctagatagtggaattacctcaatatcacatgattcagccatcttaaatgatgaaaatacggtggtcaatgatgggactatgattgctgaaaacaataatgatgatatagatgataatgctggaaaggttactattacaaataatgacaagaataacaataaagagataaatgacgaagctgagaatatctccttgattgatttacatattgataatgagattttgaaaaaacctgggactttaaccgctttattagatgaatcatcttcaccatcttcgccatcttcttttggtaatttttccgaatatgatagtgaaagtttaactaattcacctagattgactacaattttaaccagagaagatacaattcctgaaaaaatcgatatgtttgaaaaactgagtggtaatgtaccaaaacatcataaggttttacatcatcttctctctaatgatgagttttccaagaattcattgaatgattcagagagaggttcgggtatatctaaaaagaatcttaaacactttgttaaaaggacagatagtggagttgtattagaattgaaggaattaattgagaataaacctgaaataattcaattgaaaagtgtcaaactagcaaaggatgttgctaaactagaggtactaaagagttttaagaaaggtagatcgattagtgagatattttcggcacttttagatgataatatgaaagatctgagtatttctgcagaatataagaataaaattgttagaccacaagatttatataacagactcaaagttgaatctgataaaaaatgggaacaattatctagaaagacaaaggataaatattatggagcatttttgagaaaatatgatgaagcaataaataaacctgaactttcaaatattgatataggagatattttagagattgttaagatttgtattgattttggagatattcaacatcgtattgtacaatatgccattaatattgttgaaaatcaaaatggtggtgatgatagtgatctaagtgatatttcaagtattaaaagttttaatggggtaagtagtaatagcatgagtcgtggtaatagtttaaatagtttacggcaaaaaatgagaggttctagtccataggagagaagaggaatggaaagagccctaaaagatagatgtatatagaatagagaatagagaatagaataataaatttatgtgtataatatagctgtataattgattagatcaaactagataattagaatcaactcaactaactaagaatcctatgaaacattcatctaatattctttcaaaattaacccaacgatgatatttcataaaaatcgcagttgcatcctttcctgcatgtttaagtaaaatatctacaccacctggatgataattaagataagaagttatattaaaaattttccctccaagggacatccaacaatcatcaattttattatgttttgctaattcgattttatctatacgaattggataagatgaaggatcaatatttttaacattattagcatgtttatatcgttcccaatgaagggctgaatgatttggtgataaacgtactttctcccttttcctattacctgaaaccacttgttgagaatcgggtaaggggaaagtttgagagggttcagtgaatgaaacccttatattaggtgggaccctggacattatactattgtttaatttattgttttaattgtgtgatatataactttaaattaaattagatggtgtagaccgtgtctatgatatgatatagtttaatatatcgtatctagtacagttgtacgttacagttatgcagtatattattggatattaaataatgaaaaattactcaataattgctgattttattgatttgtaggcggtggttttactatagtacgtcatataaagaaaaattcaaatatttttttcccctaaattataatgcttttgaatacccagtgatttccatttattttatctcgtttcttgtgatttccttagtttatttggtttcttttagaacaggcattctgctgaatcttttgacaggtttgtaggtgggaaactcgagcttttacgtttttttaaagttgatttttggttatattatatgcaaaaaggtggaaacgcttaccctatgtatgtccaatcaggtggaacagtcgatcctcatagatcaagtggtgatgaaacagatgatgagaatggtagtgagtctgatgtgattgatggtcccttgctttgtgttggtaatacaagtaatcatgaaaatattaaaagaaagatgaacaatgaataataaagataacttatttcattccgatgttaataattatttttcacctataaagaaggaatttccactacttgataatgtgaacttccatgatgtcggtgttaatgttggtgtcggagttggggttgatctgaatttggatattgataaggctatctcagaaactttccaagaatacaatagtgttgatggttttgagtcttcaaagtttgatgagacccagaaacatactattgactctagtctcagttctccggttgtcatcgaacctatgagacactctttttcatctacatcatcattaacaaatcaacctaaggtagtattagctagtcaagctaaagaaacaaatgaatctagagattcctcgtttacaaatgatggaaacgttttgaagagaacttgtcaattttgtggtaaaacttttcaacatgcaggttctcttggaagacatttggatacacaaaaaggtaaagcacaacatcctgctgatgatgttgaaagaattcgttctggtgttgctcgtagaggtgatcctgaggcaatccgtattaggaaacaagaacgtgctagggaatataatagacgtgaatatgttaaggagaaaaatagacaaagacgtaagtttaccagtcgtattagtcgtgttagagagagctatcaattaagattctgcagaaaattgggaaacccattattaactgaaaatccaacatttgctgattccatcgttttctttttaccgccatttttatggccagatgatgaaatacctgatgaaataacacagcaggttgcctataattggatctttgctattgataatgacttacaaacaactgcagagaatgcttgataaatctagtaaaactaacgaacaaatgagagaaaagttgaaacttctcaataatattgaatcggaagctttccaaaaactacaatcaggtcaacttttagcagaatggctgaatttgaatgttgacgttagggctgatctctggaagaaagcacaaagacgtgcactttgctctgttttaggtgaacatacagtttttgattttgctgcacgtgacagatggataaaacatttaatggaagttaaaaaagctgaagttgctgcacgtccaagtggtgatgatgaatattccaatgacagtgaagatcaaatgcatcttctaggtggttttgatagtttaatggatatggcaggtattgcagagatggctgaaatggatcttaatgatcttggtgacccgtcgctaggtggcggtgaagatttgaaaattttgattttccactatttatgtattatagtctttccgtaaactttgataaacttccagtttcttgaatgaatttattaatgtttaaactgctttttataaaagtataattgatttcagtcaaaaactgcgtaatatgattgtatctggcacattggtagaaacttctactagtttagaatgcgtccgtttgtcaattgatactttttcatctttatttgatgatttttcaaatcatcaattgaatcatgttttagataagtttgttgtgataagtgcaccaaattccaacatattagcatcaccaactgtatttcccgtgataattgacaataaattagataaagatattcaaattcaaagtatgcgtctatacactcgttacaataatgatttcactgtcacctcgatcagtattgagcctattgataaactaccatatcttgcttcatttacattggcttgtccatctgaagtatacactttgttggaaaataagtctagagatcaattacatcaatatattatgagtgaatgtgaatctgcaattccaattatacgattaggttatatctctcatacgttaaattcaaaagtgatattttgtgaacctcatgatcaagggttcattaatgaatcaactaatatcacaattgttgataatgattctgtctcaaaagaagtctttgttcaagaaaattcggataacggtttaaaattcaatggaacgattaaatcaaaatcaatgattcagtatgacaaattatttccacttgattctgatacattacaaaaatatacacattattctttatacaccaattcatctaattttgctgatgatgatgactcacattttatatgtgctagattatcggagtttgagaaacttgactgctattctggtgattttgtgaacttatacttatcaactactcagaaggaaccatatttagttagaatattcccatttgttgaaccatgtacatatgtggagaatgcaatttacatctctccaagattattgttatccttgtcctatccatctacttgtttttttgaagcattgtgatcttgtcagtgatacatctgtcgtcaatcctgcgactataaaatttaacaagtttattccactggctagggagttaacgatatcaagagtatcaacacctgtaactaatgataaaatattacaatattcctttttatcaaatttaaaatcatattttgaatcatccaatagaattgtttataaaggacaaatgattccgatacctattgatactactttagctaaagcattacataccacttatgactccaagggttggtatcctgaaattttaccatctggtaaacatgattcaattgcatggttcataattactgatggagtatttgaaaatattgattatgaaaataatggtaaagatcaatttattcctcttgaagatggtaaacaatatattgttagctctaatcatacgagaatggtacaatctggtattgttaaatgtagattgaatgatttaaatgttaaacttataaacgactatctaagagttcaaaccatttttgattttgcaaatattccattgccaggaaataaatattcatttaattattctaagtcgttaagaaagatttttgaaacatcaattaaaaccagggacataattaatctacagacaactgttttattaaagggtaattcaagatttatcggaaaatcaacattagctaaaagtataagtgaacagtttggatactcatttgttgaattggatgcatatgatctattgaattctggtatgaaatcagtctcgaacactgttggtattattcgaggtaaagttgataaacttgttgatttatgtgatcatcttgttatattcattaagcatctggattcaatctgtaagcgtggtgatgaacaacaagttcagcaaaaatcaattgatgattcactcagtttaagtattcttcaattaatcgatgagtatacctctaatggttctattttcatagctagtgtaaaggaagctgatgatttgaatgatatcgtcagatcaaagatgaaatttgaactagatatcaacgttcctaacgaatgtgaaagacttcaaatctttaaatatcttttagatccattaaatcttaatcatgatgaaagcacatataaatattcaattagatcagatgtgaattttgatactttatcattacaaagtgctgcgttaactgcaaacgacttagtgtatattgtcaaaaatgttaaattaaatgcattgagaaggttaaggaaggaatgcaaatcaactggaattggcttaaaatcagttattaaacttgataacggatttgttaaactcattcctattgattttgaggatagtatcaatcaagctagaaataaatttagtgattctattggtgcacctcgtattcctaacgtcaaatgggaagatgttggtggtttagatttagtgaagaatgaaattttagatacaattgaaatgcctttaaaacatccggaattatttggtgatggtatgaaaaagagaagtggtttactattctatgggccgcctggtactggtaagacacttcttgcaaaggctattgctacaaacttttcattgaatttcttctctgtgaaaggtcctgaattattgaatatgtatattggtgagtctgaagctaatgttagaagagtttttgaaagagctagagatgcaaagccgtgtgttatcttttttgacgaattggattcagttgctccacgtagaggtaaccaaggggattctggtggtgttatggatagaattgtttcacaattactagcagaattggatggtatgagtggaagtgatgggggagatggagtttttgttgttggtgcatcgaatagaccggatttattggatgaagcattattaagacctggtagatttgataagatgttatatcttggtatttctgatactcacgataagcaagcaaaaattattgaggcattaaccaggaaattcaatctggattctaagattaatttattagaaattgctcaatcgtgtccttttaattttacaggtgctgatttttatgcattgtgttcagatgccatgcttaatgcaatgattagaactgctggtgaagttgatgaaaaattagtaaaatataataaaactcgaatttctaatggattggaggtaataaatctacgtcaatggtttgatagaatagctacagatgatgatcttaaggttactgttcaaagtgtggattttgtcaaggccagaggtgaccttgttgccagtgtcagtgaagaagagttagctcattatttacgtgtgagagaaaacttcgagggtgggaaggaaagatgaaatttcacccagttttgagaaatgtgttaaattagtggacgttgatcgtttgcaactttgaattacttattttttataaattaatagattgtatagaaagtaatactagaataaacaagaatggattatccacttgctaatacgtatggtgtacgtagtgaattattcttacaatctgctgatgattatcatcgtcaaagacacagaacaaacaaaaaattgaataaacttcgtcgtgaattaaagctcatcacaaaggataccaaaaattataaagataaggagaagattacccaaattgtagctgaaaactatgatatggaacctttatttggtgatgttttattatatttagtggaaagagatttattatatgctcaggaaactagattattattagatgttcatagctcaaaacctaaggagaaatttcttgtttcaaagtataaaaaagccttacaaaatgcaaaacatttattggaagttattaagaatgaaactgacgatctaaagacattagaaatcttaacatatactgctattattaaaggttcaattgcaataactaaaaaaaagtatgatatttcactttatgcattttctattgctaaatgtgcaattcactttttatataattatcaaaaattacctgaaactataacaaaggaattttattatgaaattgcagatggtatcattgatcctgcattaaaggtttctgcatcaagtgaaaaattaaactttacagatttaaccgaattagcaaaattacaaattttcaatattgaattgattccttatttatacaaagcagttaagattattgaatcacataatgcaacatatgttacaccaacaagtgaaaacaatattgatcttttaaaggaagttaagtggggttcatatagtgcacaattaacatcagatgatttatcattagccattatgaaaattaatgaagaattgaagaatattgatgataaaaatacatcctcatttgattcaccattaatatcatatcaagatgctattactttacatacacaagaaatggaaagaaattcaagtaatgatgaagaatctaataatcaagaacaatatattattttaacctatcttaaatataattatttattattgagaattagaagagataatacaattatgaaagatttagatgcacaaattgttgaaaatcaaaacagtaagaagaaattatcaactcaaaagattattgaattattaaaagactatttgaaaattaatgaaggaattgcagtatcattagttgaaattaatgatttaccaggtattgcaaatgatgatgagctcgttgatcttttaaatactgttggagtttatttcaaggttaagaatcaacaaaaactttctcaagcatatctgatctctcatcaatataaggaagcattagcattgattgttaactctagcaaattattacaatcatgtaaggaatttaatgttgaattagagggaaatttaccaacaaataaagatttagaaaaattaaggtagagattgaagatgaaaaatccagattatatacattaaccacttatttcaatgaaattaataaagaacaatcatcatttggcagtaaatacattagtgatgatatttccaaatttcctaaactttcaccatcagaattattgaaaacatgtctacccattaaagtttgatttccaaccagttaatgttaagccagtcttatttgatattgcatataattacatcgatgctgatactaatgatgaagatgaaattaataataatagtaatgttgtatcacatgaagttgaaactagtggaaatgtagataatgaagaggataagaaaaagagtggatttttcggactgtttggtcgttagaataaatattaatctaaactattatactataaaaactgtatttatgtaagtaacttttaaaaactaactttaagaaaaacagaaaagcttattatcaatcaagtatagacaccgaaatgagatgtaataaatagaactgtaaaacttaacgatattgcagagatagcagctaaaattgtgtataatatgaaattaaagattgatttagtgaatgaagatgtctttgcattaaaattgaatgtaatcatcaggaagaatagcgtagtgattgaaatcaataataatgtatagtcattaagtgatgcgctgtaaacaggtgtgaaagatttatatgagttgtataatgcctatatgttaattgatgttagtattcaatgtttattttgattgatgtaatttaatgtacatactgtaagttcgttgaatgatttcattgtgtatattggttgtacaatcaaagaagagatctgaatgaaacgtgtttaaaagaaacagtgcagattatagattcagagcattaatttgtaccagtgaggaaaagtttcatgaactaaaatttattcaaatctattgatatattaatttcattaccaagtttatatcgatatttatgttttaattattagacattattaaaaagttataagattatatatccatatctatatgtacatagtcattagaaggttaattgatcatagaaagtaatcattattagtaaaatcataataaacatcattaggagatataggttttaacataattattaaatcttttaatagtattaaaaccatctaagagagtaagtaaagtccattcaattgcataatctaaaggaacacgatattttgtaaatcttgagaacataaagaaataaatttctaataaatgtataattatagttgcgtagaaaatagtattatgataaggtttaacacttaacataaatggtaaataatttgcaaaaattgtatcatataataaatcggggtaataaaatccaattggtaataaaataactagaaatattagaaataagttaatgaatgatgttggataagaaatacctgaaactctaatatgacttaaatttcttgcttttgcagatatttgtgccatttcaataatttgattttgtacatcaaaccaagattgacatttatgtggataaggaattggtcttaacatttccatattaactaaaggatgtttaaatgatataactaattcagttaatgataaacttttgattttaacatttgaaatattatttgaagaatttgattttgaattaattaaagttggagcttgaccatttgaattatttaaagattcatgaggatctctcactgataaaggattattatcaggatttggatcagttggaatatcggtataataagttaaaatatctaaaacggaatgtctataaacagtattaaatttagataaaagcatagcctcattaggggaatcatttgatggttcattattaatatcagacatatttccgttgactggaaaggtgtaataatactaataatattcttgtacagtcagtcctaacagtgacttattaatgcatgcatctcttatatacaactcctacaaaaaccaaatgacgtgaaaaaaatacattacgtagcagtcgcgtctctttcagaaaatagactatttaaattttaattttaaattttaaattttttgacagtgagaacctttgagctcatctgatgcttaatatatagtcaacatcaataattattaattgttttgccacttttgtattgtatctttagtttttatttgatttctctttaatctcttcttttgctaactcaattggcttataaagcaatgtcctctgctcaatctcagggtcgtgtcgctaatcaagctaatcagccttctcggtatgtatacatttttattattattagtcaacttattttaatttttaatatgtgtttcaattttggcagtccccatttcaatttcaattatctgcaattctcccgttttaacccgtttcctttgaattttcatgttatatctattatatattcatatatatatatgcattattaattatgcaattatgatttattagttatctaacatgaatatttttataatggaaatccctcttttattcatcatgatttcaagtttatttcaattattttattgctttgtattttttttttacttttacttctttttttttgttttttgcttttcaactgatagtcattacatattaaaagccaatattgattcaattgacattaattactattattattactattattattataatcatcattatcatcaatgttattagttataaaatttgttactattgttattattagttattatactcaattatgatccttcaattgttattatcattatatcagccttctaactattattgctcaatcaacttatcacaatgaatctgttcttagacttaatatatcatatcaaatacaaagattccatatttcactttcttgtttttatgttctccttcttctttcttcaaattgatcttataataaaccatgaaattcgttgatcgtttaaagggatgttatagaaatattcatgaaaaatgataattttataatatctacaattgaaaattcatttgaaaatgttaaaactcattcgataatttattacaaggaaactaacatataatctcttccctcctttatttcttccctttttttcatctcagaaatgagtttatcaatcctgccttaatgaaacttaaacttttagaagtcttaagaaataatgataaaacaaaattaaatgatttaattagtcaaattgataaaaatatctcaaattatgatttttataaacttaaaaatgaattattattatacgctgttcaagttggatctttgtctattgttatgtatattgttgaacatgatctcattgatgatattaattcgcaagattctgatggaaatactgccctacatttagctgctatttctaatagaaatgatttgattgaatatttaatgaatttaccaaatataaatgattgtgtttataatcttgaacaaaaacaaccaattcaatgtactactagtattgaaactgctcaacttatggattttttaagaaatcgttatattgagaaaattgcctcagaattaagaaattcatttgaatcaagaaattttgatatgctagaaaaactgttatcaaatccgagagataaagaattattagatattaatggtacagatcctattacaagtgatacagttttaattgaatttgttaaaaagaatgatcatgaaatggttaaatttattttaaatcatggtggtgatcctttcaaaagaagtttatctggtaaattgccagaagagttaactactgatttagaaatgaaaaaaattattgaagaatcatttacaaaacaaaatattttagaaattactgctcgtcctcaagaaggttctccatcttataaaggatttttgaaaaaatggacaaactttgcaggtggttataaattaagatggtttgttcttgatcataatgcagtcttatcatattataaatctccaaatgatatgaataatacttgtagaggtttaattcatttagctcatgcaatgttaaaagttgatagttctgaaaatacgaaatttgaaattattatacaaaatccttcagatggctcacctgttaggtggcatcttatggcaaatcattcaacagaggctcaaaaatggatttgggttttacaaaatgcaataagatttgctaaagattctgaaaaaactcaaaaaaaatcaataacattaaaacatgtactacatgaagatttacccaatagacatcattcgattggctcacatcatcatcaaccacaacaacatccagttaccattcctgaaactgatacattatctaatgaagatattaaacatgatgagactagaagacctgtttcctccattatttcagaagctcatgaagctgcaaatgatttcaaagaattattgaaagccacctgattcagaaactgagttaccattatccaataacattaattcagatgatgaaactaaatataatactaataatagctataatgataataataataatgattttaatgatgatattaaccataatgaacaaaatactaattctatttccgatagcttaagaaatcaaataggccctgtgcctgatagatcttccctatatagcggttcaagtaaaccactatctgttgctggtattgaaagtaattatgatcataatagatcagcttctgttggatcattcaattcaaataagtctgcaagcttcagaacattcaagtaaaaattctctggctaaaagtttatacaagaaaccattaaaaaagttatccaaaattggtagaaaaactagagattcattcttagttgacaattcaagaaacctaaattctccttcaaaaactactctgtctaaaattgattctactaatgagtcaattatttcaaacggttccagttttatgtcatcaccggatttaaatgctagtaacggttttgatatgttaaactccccaagtaatgttgaaggttatgatgattatgaagacgattacaacgttaaatctaataatattaattcatccccaagtccaagcgctgcaaatccaaacaacgatttgaatgttgttagaaatcaaatgggtatgcagttgaaaacttttaaagactttttgaatacagcagcatcagatgataccatctctaaaaaagatctagttgagatgtccgttggaattttaaatactttaaatatgttaataaaccaagaaggtgattgtgttaatatcaagtacaatgaattagtcagacgtttagaaaaacaacaaaagatttcatcaatttgggaaaattctattaaacaattagaaacagaaattcaacaaagagaaaataaaattgttgaattggaagataaattaaaggctgttaagaagtctttaagaaatagtgtcaatcatttacatgcaagccaaaatgttcataaatttgaaaatggtttacaaaacttaccaaatgaaattcaacatgcttataatgaaaattcggctgctaatttagcaagacagagattaactgcaaatattggtgcttcaatcaaagaaattccttcaatcccttcagatgataaagttagtaatgaacaaaaagtagaagaagaaagagctttacagcgtcaaaaggaattacaagaaaaatttaatattaatgcctcaaataatgttccagcagcaacaccaagttctgaaatcaattctcagactgcaccctcatttccacctccgcctgttccatttgttgatccaactttaacggaatttttagaagaaactgatgatagtgatgatgaattttttgatgctgaagaaagtgatgaagttaaggatatgtctgttttagcaagaagagaaactatgaaggcacttcaaagaagggcttcatcaaaaaattcacctatctctccaactgaaaatgttacaagtcctcctgttccagcatcaagtcctcctccaattccttctttaaatgttgaaacttccaaagctactgttccaattataaatgagccagatgtttatgatcaagaatcaaatagtattcaaaattcagaaactaagttatctgaaaagaaagaaaatttaaagaccgctgaaccacagtctgatattttaactctgaacgatgttagtactgaagagttccctaaatctaaatttgaaccaactgttgattctcatggtcattatgttgtcaataaacacgaattagttagtgattctcaaaatcaaagatacaataaaattcttaaagatcaatcttttgaagggtatgaagatcctcttagattatctcttgcacctgaagataatcgtccaaaaatgtcactttggggtgttttgaaatctttggttggtaaggatatgactaaaatgactttacctgttacattcaatgaaccaacctctttattacaaaggaatgccgaagttattgaatactctgatttattggacaaagcttctgcaattgactcatcaactttaagattggtttatgttgcaacatttgcagcttctgaatatgcatcaactgtcggtagaattgctaaaccattcaatccattattaggtgaaacttttgaatattctagacctgataaaggatatagatgttttgttgaacaagttagtcatcatccaccaatttctgcattagttgcagaatctccaagttggtcatattatggtgaatcaaatgttaaaactaagtttttgggtagatcttttgatattaaacatctgggtacttggttctgtgaagttttcccagatggtggtgtcgaaactaaaaacggtggaagaactgataaagaagtttattcatggagaaaagtcaataattctgtcattggtatcattatgggtaaccctacaattgataattatggtgaaatggaaattcataatcatatgactggtgattacatgaagtttgaatttaaaccaagaggatggagagcatcatctgcatatgaagttaagggtgaagttttcaatgccaagggtaagttggtctattatgttggtggtcattggaatagtaaaatattctgtaaaccagctgatgataagaatgctgaaagatttttagtctgggaagctgctccaagaaatgaaatgatgttccatttaacaaactttgcagctacattaaatgctcctcaaccccatttattgccaaaggttgcatgcactgatactagactaagacctgatcaacgtgctatggaaaatggtgattatgatttagcagctgaagagaagaatagagttgaagaaaaacaaagagaggcaagacgacaaagagaaatgaaaggtgaagtttaccaaccaacattctttgttcaagacaaacatccagttacaggtgaagcattctggaaatacaagggtgaatattggagtgatagaaaagaaggaaagttgaaaaactacaaaaatattttctaatctatatcatattgaatttttctctactcttttatctcttgtacattctctgatgccatatttaataatatatatatatacgatgatcataataatactatacagttatgaagtgtttacttttgtgttttaatttggatttatattttgttatagtttacaaactttgttatttttaaacctttaaagttttcttggtatctaatctatacatttacatgacagtatggaatataaaatatttaattttattgtctcttcatacgctaatgtctattataatcttcaaatgttcttggacctctaactttcgtaggtgaagaagcaatgcttggtatacttggaatattgccctggtggtattgagccagattcggagctgagtttgaatatggattggatgtgggataaaaattcatataattattactggctcctctattttccttttgctttgatttaagcattaattgaatatcaggaggcagttcatttaaaatttgagttaatttatcctctagtaaacctttaaattctgatttcatcacctttttagcatcttctaattgtaatgacattttctttctttcttcatctaatgatttttcatactttatcaattgtttctcttttaataataaagactcctcaaatctacctattgatgtttcctttcttttctgttcaatctctcttttagttatttcaaattccctttgattgagttcccattctcttctataaattttaaaggaagtttcctgtaaaagttgattaacatcagctctttctgttggttcagttatcaagcatgcactaatacacattcttaatctattggaataatgcgatggtaaatctgggtatgtacctattttgatcttctcctgtaattgtgcgtgtgttttagctgtaaatggtggtgttagagcacataattcatacatcacacaacctagtgaccaaacatcacatagtgtattataagcttgttctaatataacttctggtggcatatagtatggagttccaacataagtttgagtaaaatgtgtgtgtggtgaaagtgcctttgctaaaccaaaatctccaagtttaactgtgtatttatctgataaaagaaaaatgttttctggttttatatctctatgaataacaacctgaaaatcagatattgaaggaggtttaatttcaggagttgatttaaacattgatgtaactggctctatgtttgttccataatgacaacgatataatgcaagaagtgtttgagtaaagatttgccaaattaatgtttcgggtatatattgtttattctcacggtatcttttaataagttcagatatatcacctccatcacaatattccatataaatgtttaacattttattattaggtattttctcaaatccataaacttccacaatatttgtatggtttaagttttgtaaaatctcaaattcacttgataattgtttctcctcttttcgactcattgatttatatgatatctcttttctgacgaatattcgtccagtaggtttatgcaacactttacggatcaatccaaaggatcctcgtccaatgatatccagatcttggaattgtgcagaaatttcttgtgagcccattagttaggtatattatatatctatatatatatatattcccaatgattataacgtcaagtgccgatttgttatctatcaaaaatcaataatctactaaatttttggtaaaggaagaaaaacctttgaaatactctacaagtttcagtttcaaaaaaataatagatcaaaatgaatccaaaaatggaaaacttattatgtttttatttttcctaaacgggaatagttataattttttagtgatacctcgtattttctaagtttaacattatcgttaaatggatcaatactgccattgataagctatagacacgtttctatcatgaagtttttgacagctatttagctatattatacataaaatctacttagagaaagtccttttcaaaatttaaataaaaaaacttaatttgaagcccatttttgaccagtcaaagcagtgaaagcttcaacatacttttctgatgttttagtaacgatttcttctggcattgaaacacctggtttaccattgaacaccattagaggttaaccaatctcttaagaattgcttatcgtactgaatcttgggatttgccaactgcgtatgttgcagcattccagaatctagaagaatctggtgttaagacttcatcaactaaaactaattcaccatcatcagttataccaaattcaaatttggtatcagctaaaattatacctctagtcttagcataatctctagcctttgtatataattcgactgctttttttgcaactttatcgcaaacttcttcaccaacaattttagctgcttgttctggagaaatgttttcatcatgttcaccttgttcagcctttgtagatggtgtgaaaattggagttgggaaaacttcagattcttgaagtccttctggtgctggtaatccatgaacagtattagttttcttatattctttccacgcggaaccagttatgtaacctctaacaattgcttctaaagcaattaatttgtgctttctgacaagtaaagatcttcctgataattgatttttatattttggttctgataattcctttggtaattttgcaaagatttcttcatctgatgatgcaataatatggtttttgatatcatcctttaaaaaatcaaaccaaaaaatagaaatttgagttaaaagcttacccttatccttaataccattttccattataacatcatatgcagagattctatcagttgcaacgaaaagaagactttcaggatcaacttcgtaaatatctctgaccttaccctttgcaattaatggtaaaattccgtctaagtttgttgatgtaattgacatgtttatattattgaaaattggctaataaggaacttcaaaagaaactagatgaatataaaatcaaaatcggagtagattttaatttctacattaattagttatataagattaagtatgattctctaaataattttttgttaatcgtggtatttgactctggcccttgttcccaaaaaggaaatttcaatcaacatgaaaatttgtaaaaattttatttttggaaagaaaactttttatctcacttgaaatctgcccttctccagagaactgcttagcaataacactaattagaatgtccgggaataagagaaaaaatgatttagaaaatggaaatagtaactccaaacgatctcacaattcaattgcgggactaccattgaaaccaacttttggaaccgaattacgaaatcctacatttccaagctaataatcataatttgaataataacagtaattatgataataataataataaagattctggtatacccaactttgtatcacaaacgcaaaattatacaaatcagcctaatcctgaaacattgaaacttattggaaccttaataaacacgattcaaaataatcaaaatcaacaaagtcaagctcaaaatcaaggtcaagttcaaggtcaagttcaaggtcaaggtcaaggtgataatatttattctcaagttccttctttatatacacaacaattcccatcgcatgaaaattacgtacccccacgattaggggaccatcctccatatcttggaaatgctactagagaccattttggttataataataactataacagtaattacaacaatatttcataacaataataataccaatagttataataatatcaataactataacaataactataacaacaatcactataacaatcagtataataataactataacaatatctataactctaaccatcagtatgtcccgaccatcatgccaaattatactccatcacctcaagtattggatcaacaaacaaaactgcttgatatgtacaataattttgtgcaaattcaaggaactccttcctacaatcaacaatctacacacaaattcaatcaactcccgttatctcagcaactggatgaggatactaaagttaacattccaccaaaaccaaatatagtccaaaataaaaaacagagcaagaaactgaaaccacaaagtagtaataaaaaggccaaaggaaatatcaaaaatggttctgacggtgaagacaattttgatgatatatcagatgacgatattttagatgaagagaaaacgtttgccattcaagggactaacattgtttttgaaaatgaagaagatgttgcaaaatggattgaagagagaaaaaagaattggccgaccaacaaaaaggttgaggagaagaagaaggaaatggagacagccaaaaaaatagcagacaatctaataaattcaggtaccaaatcatcaaaatctaaaacaaaggtatgcagcttttggcttaaaactaaaaaatgtagaaatggaaaaaactgtaagttttcacatgatgtttcagatttaccaaacaaagagatgaatccatctaagaagtcaaacaacacttatttcagtactaaatctttgccaaatcataaagccaagattgtacatggaatccctattcaaattccgcagagatttacaccattaagtaataaaggtaaatccttacataatttaatggttgaaggtgaccaatttaagaaagaaaatttggatgttatcagtatttttgaaaagcttgttaacaaaggtgtcatcaataccgattggaataaattgaaaaaacaacttaatctagacgtcgagtgaatttcatttataatattcagaactatataatttgatcgataccaaaataaaattttataatgtattacttttctaattaaaaatgataaagcatgtatctatataaaccttacatacctctaaatgcattcttacttgctcttcttcttccttcagtaacttgtttagacttaccttttctttcactactttcgtcatcccctgcttcaaatctaactttactgacttttttagctggtatgaatgaaatttcgccttcaccaatagcattctttcttattcttgtatttgatctcttttctttctttaccttactatcatcgttcattatttttgcttgtttttcaaatgataatgattttgatgttttaattgaatttatatcatctgctttatctaatgatttcattttagttaagtattgtttagcttcttcacgttcttttttcttacgttcttgtttctttttcaattgttctttcagtttttgtttataaacttctttttcttcttcttcttcagagtcagattcggaatcagaatcagaatcactcaagttatttccctttttatttttagacaatctttcttcatcagattcttctgcagcagttaatggttttggaccagctaatgaagcaactggattcaattgtttataatcatggttatcttcatcaatttggaaccttggatcttcaaacatttccttgaaacggtcatcattaacaactgtttcggcagtttctgcaccaagtttgttttgcaattgaccaacatattctttattaactttaacctttgtatttgtgatagtaccagaacttctaattctagattctctttcttgttcaattctctttctaatttctctttctctttcttcttgcattgagttaggattagcaattaaattaaccttatcgtataattcgttatcaataaaataaccatgcatatatgctcttaaaacatttgaaccaatcaaatgtgatatacccaatttggcaacatcttgttttgtcaagaatttataattggagtaaacagtatctgaaggtttttcttccaattcttcagtaatgttatcaaggaaagaacaccatcttggagatggacctaattgtgggatataatatgtgtgcattggaattgattcatttgccataaagaacataccagaaccaggtatatgttcaacatcatttatatcaacacttggttccatagcagcataaggtttaccatcatctctattccaaattttggcaatctttttatcagatgttaagattaagtttaagttttcattaccagtttcttctagccaaataatttttttaattccaaaaccataaccttgatctttagtgattaatggatgagaagttctcaaatcataaaccattgacatcccatcggatgtaccacatgcaaaattaagactgttattagcaaatttaacacatgaaatttcacttccattttcatttgcttcaggtatttgtaatttaacaactctttgttttgctcttggatcccaaaattcaacggtaccatcttctaaacctgcactaaataaaccatgaattggatttatatcaattgaatttacccctctctcactttcaatattaaaaggtttcataaatctaccttgttccaagtttaatctataaatttcgttaccacttgaaccaacaaataaatcacaagtcacatcattataagccaaagatctaccaaattttggaattcttattctgtgtttcatttcaccttttatttgaaattctaaagatctatcattttgcaaatgaatagattttgtccaatcatcagataagagtataaaatcaacattttcagtatttgtatgtctttcaaatttaagtgaaagattagcaaaatcataaacatgaatttgaggtttataagttcctgtagccattgcaaattgaccatccttggtaactttgattctattagatgattcactgaattcaaaatcttgaattaattcaactctattttgataatcgatatcattttttaaagatctcttcctttttctttctaaccaatctggaagagatttcgatacattagtaccggaaatttgatacacggatgtatcatttgaagatgcggattttaaaaccattgattgttaggatactactgaaatgaatccaataaaatgagaaaaatgttaataatcagtactgaaataatagtaacaaaagatttttttgatgttaaaaatttttttttcttgcactctaagagaagaacctcgtaatatcttttgtttacgtaatgtaatctcaaaaaatctgttaagagtattaatggatggtatattcccacattgtgttacttttcggtgatacatttgtttggtcatctattggtcaacagagaatatggatctttctaaacttactaatcctgaagatacagtgcctttggatgatgcaacaaaggtagtcaatggaaacaatgttgaaatcaataacgacgaaaacgtcaatgttgaaaatgatgataataagaaggatagaaatgaagatgaagaggtcaatagtgacagaccaattgagaatgaaggaaaggaaacacaagtgaggtctactagtgattatagaagattatacaattatcttttggaaaagtatagaaatgctgttcgtagtacgaaagtactggaagagtttgagctttatctgaaaaatctttccaaatatcaacaactacgaaataatatgcttattgacactctcaaatatttaaatgatcatgaaactttagaccctatcgatcctacgaacacagaaaagctaactgaaaaaatgaaaggaatagaaaagaatgatccacgtttctctgatttaatttcaaaattgagaaaattagaagctacagaagataaaagtaatccaaaaaataacataaattcattcaacgatatagtgggtataaatgatgcattatctagtgatttatctattcttgaaaataatgcatttccagatttatatgcaggaaattttgatttattagaactagtaaagaagaatccttgttttacaacagaaatcacatctttgacagaactcaatgagcaaataaggaaagagaaagtagaaacaattaagagaattgaacttgagcatacgcatcttccacgtaagagaaagaaggttcaatctaactcagcaactcctcaacccaatgatgatataatactgaaatggtaatgataatactgacgaggttccaaataaaatagttaaagtagaaagtcaactttctgctataataatcgaattaataaactatttatctataatatgtactaatgctactttagctttaaaaaaaatatacgttttcttttgtttataaaaattattcaatcacagcaacctttctcttcaccttcttctttggtttcttcttcatctctactatcggaacttcaatcttaatttcatccttcttagattgggcatcatcatcaagagttctttcgtatgggaaattctccgtttgatattcttgggcaaaactttgtttgacttcatttgctggttttgataaaacaacagatgctaaggcagaaaaatcactatcaaatggtgaattacttttctctgggattgatgttttagcttatctcagcttcttcttcatcctcagcatcaaaattgatgatcatctctttcttgtgtttcttaggtttagacaatttacggggtttcttctcgacagtaacatcaatcaatgtattgttttcgttttctgttgttgagctattgttgacatcgactgtagatatgtaatatggatcattttcgtgattgttgactatttttgtgctgtctacttcaatattagaatctgtggatacagagtcgcttatatcattatcaccatcttcgtaatcgtcttcattatcgctgtaatctaaattcaagtcctctaaaataagtttattgtataagttttggaactctacaacagattcatcataatcaaatttcttaaaatcaaatcctgcaggtggtaaaattttctgctgagttttcagatttactggtttcatatcgcatgatgagaataactgactgtatccctttgtcaaaaacattggtgggtattcgtagcctgtatctgaagattttaaactttctaattgcacctcaattgattcctcaactaatcttaaaacttcaatataagataacgcacgttcttgaactttaaagtttggactgtgttcaaattttataaaccagtttataactttaattataacattcttaataaattcgaactgagattctgaccattgaccttccccatatatgccacaaaatttactaaatgactttgctattgcgtgaatataagctaaaattgtatcatcaaagtttgtgtttcctaatgtttcgagcacactctgactggatatacaatcaattatttcaataagtgatactttttcagccatattttcatcttcctcatcaatactatcatcttcatcttcttgtatatacacatcataatattctccaataatccaaacacaattactcaaaccatttttaaagagagctaaatctttgtttgtatcttttgtaactccaattatttcaaggcacatagtcactaattccgatctcacacttggaaccttcaaactaatatcaattaattgttttgaaacaattagatcaacattttcaatattattaatgatgttcaaattcagaatatctttcaaaacacctaaataccatttaaaacttggtatattgatgtaattattcatggagcatatgtcaataatcttgttaattaacaaatatttgtatttttctgtcactacaataggttgttgagatgagccaattaagaaagcttcgcttataccatcattttcatcttcatcatcttcatcttcatcctcattatgttcactatcggcaactaatactttatcgttcttgttactcttttttttcttcattgctgttatcttggaatttatcaattctaattgttcacattgttgtttgtatggtaataactgaattgttaatcttgtaacaatagccactatatttttttgcgtaaccaatgaatctacaatttcaagagacttttctctaattgtagaatcaacatcacagatggaagttaatataatgcttgaatgtttttgaattaaactttcatgaatattacaagttttaataaaagctaatagtcccacatattttagattttgatcattactcttgaaaaattcaagtaatttgtttataacaatttcagctgtttcaaaatcatccggtgataacatatttccattaagtatagcattaatacattcatattgtaaagacaatgcctttgatttggctattaaagcttttatttcaggtaaaagtttcttctttaatcttggttcagttaatgaaagtgatgcaaaaagtttcaataatctgataaccatccagttatttgaggattccatcatcattacaaaaaaccttggcgctagctcgatatagttaactggattcatataagctaattcacaaatgacatttacagtagctgataccactgcattatcatcatcttcaagtctatcaacaattctatcaaagtatgttcttaatgaatcagggtttttcaaaaatattttgaacattgctaaaactgctttttttctaataattggttttgaatgtgttaatagttttgacatatcatcacacacatcaactgctaattcctttgatacaacagttgcaattccactaattgctaaagaagtttcaacatagtgagcagaattgagatctttctttaataaatttgtcataagcatcaatgcatcatcgttatcttgtctttgtaatatttgagttgcagctaaataaccaattcgtttatgttgaaatttttgagatgccattacttctaagatattaaatgagcaccaacttgcatcaaagccatacatttctaagtatgttaattttaagattgcacctgattttgtatctaaatcggatgttcttaactcagctttacattcctgtattgatttatcaaagaattgtgctaatttctcttgatcattattatttgcacgaatacctttgattaaatcttctaatgatttttcaaaggtaattccaaacggtcttaaacgttcaatcatctccatgatagaaaattggactttagccgttgattgtctatatattaatgttgaagagaatgaaaaaacagcttgtcatcttggtggcaggtatatatctcatgcatgttttggaattttgaattcatgtggcgagcagctcaacatgcacctataaattaaaattgacttctttcgtttcttttactcgtactttactatcagataatacatattaaggataatagttaataaactcacggtattggtgaagtatttgtgatttaataaaaggcttttatgaattgatttttagttcaaatcaaaaaaaattgtgattgtttcatgttttgtacgatcgtataacaaacagtatggaaagtaacaataatgatgttgacctagataatggttcagatacttcatcatctaatgaaagagtaccaataattgatgatgatttaccgaatagtattttaacatttgaaggtaacttgcgtggtgaagacattgatttgaatacgcataataattttaatgatcattggactatttgtgagagtttgtatagtgaagataacgaaggtagtagtgatgttaatactgatagtgacagtgatagtgatagtttggatattgatagaatatacagtaattcatcatatactgagagaagagagaaaagttcacaaaatcaagagcaacaattcaatccaattgagtatttaattggatcattaaataatgcgttaaattcattagaatatgataaatcattagttattcaatccaaaatggcaggtgaattgaacaataccaccaatcaagttttaaaaaccattgaagatcttcaagcttcattaactgaacaaatagctaaatatgaaagattgtcaaaggagattatacctgagattgaatataatttaagaaaagcaacaaaaaatgctaagatacttaccaaatatgttaagagtacgtatccaattgagtattcaaagggacgttcaaaggttttagagaacctaactgaggatgaagaaggtcttttccgttaattgtcggggctcagcatttttatagggtcctaatgataaattttacgaaatgttgcttgttattcactgaaatttattctgaaaccactggtttgatccactgtatactaaattgttttaaattgtatattttatgtatgaaattgatgtaaatttatgattactggagatctacaaattactacttctatcaacatactcatgacatgcaaaatgttgtgtttttgattttgatgtcgttttaaactaaaaaagatacctaaactaaaggtttttgaacaaataaaaagctaagtcaacataataatacattaataattattaatagaggtttataagttatttactatagtttatatctaatatatctgttacaggaaaaattatatttttcaaatttgtacaacttttcttaatttttctgaaattcttaaatttttgcaaaattgcccatcacgtgactatgcgccacaaaaaaaagcattttatttatctgctgcgccactttaagatttccttcatcatgatttcatcattggatgttgtgaaagattatataaggagattgatgatttgaatagttcctgggaaggtgctatatatacacactaaacacactaaaatacacaatgagtatgctcaatattaacattgagtccgatagaaatactttattggacttttatcaactgaaaacccttgatcctaaaagttttaaacaagatacgatcccatcaacattgaaagttgatttgtcaacagaggatttatctcaaattcccaaggaagtagtcaatcatcttttgggtgataatatgaatgatttaaaagacacaaaacatcaaataagaccaaatagtattaaaagacaagggaaagatcaatattctgatgcactgggatttcatcaaaacattttagatgatttgattgataaagatattttagatgatacaagagatcctcaattaaataaatttatggttgattctaaacttttcaatcctaaattgtttttaagtgttattcatagtgataaatctttaaatcaattgatgattggtattaaaaatctagaaaatgatattgaatcaaaaaaaccattattacaaaaattaattacaaataattttgagaaaactttaaacagtaaaaactccttggataagatatttaatgagttttcaagttcgaatttaggtaatgaaattgataatttaaataaaaacttagcttcttccaacaattctgctaatcaaatgttaaatccaattcttttaatgatatccaaagaacaagaactttcaaacgctgtgaattatgttaaacaaaataagtttttcattgatctgcccaaaaaactaaaactatatattgacgaagacaattttgattcagttattaaagaatatgaaagaggtgtctcaacatatcaacaaatgaaattagagcaaaaaaataatgcattatttgataaaatatggaacacagttttgaaaattataaatgattataaattatcaatgattgaagatctcaaaaaaattcatattgaattaataagtagtaattttaaatcgcaaatcaataccaagaaatcaaattttgttttacttataaaaagaattattgaattgagtccagatgaaaatcctatcaaaaattttattgatgtacaatatcaatacattttaaagtatcttgataaaggaatggccaaaataaattatgagagattatataacgctagaaattcaatttacaatctctatgataccactgatatggctgatcaatcccttataaatgataatagccttttaaagatgtcagcaatgcgtatattttcaacatttagctctataaacatttagtgaatctgaaataaataatacttctgataaatttgactctctaatagttacagaaatatggaaatttgtttttgattatgttcataatgttaccgaggatgttatcagcaataaaattatgagatttgaatcaattgttgaatattttgtacatgattttcaagaaactttaagtgatagagcaaagaattcttcatttacctttgatgctgcttatttgaaagatatgaaagtatatttcgaaactatgtcatccaaaatttgtagtagactcacttttcttttctcatgtacatttgatgatttaacaaatgctttgaaattaacagcagttgaaggaagtcatgcagttttaccacctgtgggaaagtcggatataaataatcccatttcttttggttttattccaaataacactaactcaatttctacaatatattcaactgtcaaattattcaacaagatacaggaaaaattatcacaattaaaggataataatttagttttaaattccaaagatattaccgataaaatcgatactgcaatatttgaaatcaataaaaatatgattaagggatgtttatcactcttactatctgatatcagaaaattagcactttgtgataatatgcaacctaacgaggaaatttttggtgcaacaaaattagtgacagtcttgttaaattactataaagtgtttatttcaaagttacatgaacttattgtatttaagaatgatgaaactaagactataatagaggaaacatttcaaacatcatttgatttactcttagaaggaatgattgaaaatattaagagaaatattgcaatcgattcatatagaactgattattactatctagccacagtttataatatgagaaacttctccaacgaagttcttccacagattttaaaatcatttgacacaaattttcaatcagacttatcaactaagaaagacttagctattttcaagaaaataaaatcatacgaatattctgtatttgttgattacatgaaacaaccaatttctgttctaaaacaaattgttgatacaggtatttcagaattggaggataaatcatatggcatttcagataaaattgcatcaggagaaacaattaatgtctctaattacgttttgaaagcaataaacaatatcaacaatcttaaatccaaactacaaaacttcaatataagagattcatttataagtgacgttaaggcaagtttaatagtccacttacaacaaagaatgacgtcaagtttctctgtagattttagtgatgaagcgaagtatcaaatagctttggatatagatgttttattaattctaataagcaagtacaatgagaaatcacatcaacaaagtagacttgatactaaaaaatttgaagaagcatacaaaagtctctgtaagaatattgatacctcatctttagagaagaacagagatataaacttaagttttaattatgttcaatttgtctgctttacaactttataatttttgaatcaaatttttttataaattctctataatgtataaataaatgactagaaaagtgttgtacaaacttaatcctttaaaacgttttcaataagatcatcaagttccgttaattcagcgattctttttctattctgtatattctcagctagtttgttatcatccatactaatgttggaatcatatcttaaactgttattgatggtttcataatttctcagcaacattaaactgttattatttgatattgattgtattgaattttttgagatattctcattattaatagttctgcctgagttagaagttgaattactttcacgaccacgcttcgcaactactgtagggagtaaacctgaatttgaaaactttcttctcttcatttttgagacatcaatgactttgctcaaatagcttatttttcttttaatcaatgagttttgagcattactcaagttcttttgagataatatatcaaaaccggaactctcagacatagaagttaatgctgaactttttgatattcctgtatctcccgcataatttatactactacttattgtaacatctgatttctctctagaatacattttagtccagactttttcaacaaaattgttcaaattgttatcaagtttatttagcgtagagacaccacaatcacttattaatttagctgcatttagtttgaataaaccaactgatactttctgcgacgcgatctcttgtaacttaagtattttagaaacttcaccattagccatatgaatattaaatgaatcaacataaacaaccaaaatggaaaagttattatatttagagtatagttttaaatattcataaatcttttgaattactaaagcgtcctttgccaaacatctcaacaatgcagtccttgaagatttatcaataccttcaattgtaccaacttgcaaaattacagacttagtatcttgaaatgatttttttacatcaaaatcatcaggtaaaactttgaagcttagcttatatcctgtactagaactagattctgtataactagattctgccgacacattgaatctatccaataaccatgatgtggatatattttccgttgaacgagcaatgataagactattcaaatcagatgttggggatatcttctcaaaagtgttacgaatttggtctatggaatttttctgttttataggtttttcaactttaacaatatttaaattagatgagtcaggtctgataataggaaccgaaggcacaacaaaatcattgaatctttcgatctctttttgtttttcttcatctatcttctttttttctgataaaacatgtagcttctcttgaattacatcaaaatattttttatattgcatcttagtattgaaaactttagctctagcatctaaggaaaccaaatatacttgttctttcataaatgcttgataaagttctttcgataatttatccacaagatcttgtttcgttctagcttgtcttaatcttttagcagcttccagttgttttttaataatttcatttgatagcttgatagcacctttcatggccatatcctcaacaattttcattgcttctgttttaaaggcaggattatctactaatcttttgaccggcttggcttcaacgaccacttcttttttggaagattcaacttgaggaggcacttggtctatttcttttccggtaaacttgaatgctggttgaatgtcaggttgttttaattcagcaaccacattttcattagtttttgaatttgaaaactttgctgttgtatcgaaagaacttaaagatttgaatttctgatcactgttggttcccattgatggattaacggtaggtttgttcaaattaccaaagttaacatcgagtttagagttgacttgaaaagaagtaggattttctgttatttcaactttatctcctattacttgattgtttattggctggataaatgatgcaaaattatttgaaggcacatcatgcacccgagaagaattggatagatgactgatttttgtaaagttggattccaaaatttcttgaacattttcagtatttcttttagcttcaacaaaacttcttctagcaacctcttctaaagacagcggtgatttcagttgaaatggtggattaggtttgttaataatgtcaggcatagttcttccacttatcatgttatctatttttctagtataagcttgtttttgagagggtttgaatcctgattttaatgcagttatttcaacacgagatacgttaaattcagagtcaaaaaatataggcaattgatataatttacatgttagctgcaattgttcttcatcattatattctaaacagtcaataagttccatggttgttggtagttttttagatttagcgtgatatgctcttccaagcactcttaatgcattgtatcttatttcattaaaatgtatttcagcaagagatgctagcaaaaagctagttttggaaatatctaagacagatttgaaaaattcataatagtctgctatacctgatctatcggaagccaaatttctcagcattattgcccgttgaacaaggttatcatttataatatattcaggtaatgtttgaatatatctgtccaactctgaatcttttatttttgagattaactcatatgccctaaactctggctcgtttatacatttaccacctcttgaacggacatcgttatacatatgagtcaatgtttgtaaagaattattaaactgctcaacttcttgctgttgttgataatcaggatcatcagcacctgacataatatgcaatgacaatatatgaatcctacaaattttttcatgacagtcaattgattcaataccagaataattattttgaaaagtgaaatcttgtctaattgatcttgttctatcccagatgaaagattgcgattctgggagatgttgaaggatatttttgattatatagtccaacgtcttttgtaaaacatcaggagatctaacatcagatggtaatgagggtgcttgcccagaaggtctcataaatgttttcaatgctagatttcttgatattttatttgtgtttggatctttttcccattttgaaacttgattcttaaaaactcgttcaaccctttcaaaggtcggacacatatcctgacagcttcctttaaaaataattgcatcatctaatgattttttagcattttccttatccaccaagtttagcttttccatttctttcctttccttgcttctgtacccttgaaattcttcaaataatgattgtgcatctccattgaattcactttctctttctaataacatttgttgattatgaatatcccactggttaggagtatatgttgacatatcaaataaaacattcttttgaagtaaatactttgggacctttggtgttctatgttttactttctgaaagcctagtaattcagggttttcaagcatctttccaaagtattttgtttcaaaactattcgtgtctatcactttatctttctgaacagaagaggtttgaaacggtatattgtttgagctgttagtatcgactggtataattgaattccttgtattattattttttggacggttaggtacacttgtaggttgtgacgcgttgctaccacttgttgcctctattgaaacaccaatattgttattattattttggttatgcttgtagttattagagaacttcgatttgttatgttgattgttgttttgattttggtgtttgaattggtttctggaaccattgacattattattttgtgtatcatttgtaaatggtagattattatttttgttattgttcataaaagctgaatgccccatggcattgctcgagttagacttaataaagttgccattaaaatttttattatgattattattaaagttattgtttattttgggtttgttgaagtttggtttagtgccattattattatcattcgtattattggaattatatctcatatttgaaatattattgttattgttataattattattattacccatattattattacccatattattattaggtttattataataattattattttgattcccaaacccagtatttttgttatttagattcttgtttgaaaaacgattatttcctctggagttcctatcgaaatttacttggggttgaacttgttttccctgaaagtagttgactttggaaaaatttcctccattattattgttattcatgactctttccaaaaccaaaccttttcaccaaacagcctgcctaataatgcagattgcagttgaattgtaaatagtaggtataccctataaaaccatcaaatctgggtaagaattcatgataataatccaacatgtcttcaaattttgtgccctatctaaaatgtagacgcgaccatacaattacataatattttaacgttacattacagaattaagcattattaccttaaaacataagcctagtacaggaaattggtatatagcattaacctcattatacagaaccacggtagttaattaaattgagaacgtaaaaagtaacatcaacaatcaaaagcttgaactttcttctgtaaagagagaaaagtgattcaaaaactcccaaaccccagtttatactccacttagcattaatcttggaattgtttatcaaatcatcattatatacagtattggcacaataatttgccataatgacaaaagttctttcttgacctaatggattttgtaaagattcatctaaatgcctaactaaatcgttagttttaagaataagtaacactattcttggaactgttgctagtaaactcattaaactcagaaccattccatcactcatcattgcatctttcattttctccatttcctcattagttctcttaccttccaaatcaccagacagtgcatgatcaaaatctctaccagtgattgcggctgcaaataatgggaaatgttcatcatcaatctttgcaaattttttaccataaatcttcatttcattttgctttttatcaataagagctaaccaaaatttagcataatcaaccttcatctggttaggtatggttctataaagaccgtgatcatataatacaatttcaaagttgtgtccattttttggcttatctaaatatctgattgcaatattaccatgatgtgggtcacaatgaacaaaacctgattgaaaaatcatattattgaaaatatgcgccaaacaaccacaaacttcagatctagaaatatgatgtccatctatatattttagatcatccagtcttgcaccaccaataaattccataatcaagattcttggtaatgctttataaacatctggtattcttaaggcagtagactttaaataatctttgaaatagttctttgttttttctgcattttttgcttcgtatgtaaagtttaattcaacaaatatcgaatcttgcatttcatcacctagccaagttaatggatactcagggaaaactttatacatcatatcaaacacaaattttgttaatgcaacatctaaggggacaaatttcgccaatgatggatgttgtaatttaactgcaatttcttggtcaccttcagttaatactgctttatgaacttgtgcaagagatgctacaccaataggttttggatcaaaacttttaaaatattcattaaatttttcacctgtatcatgttcaaacatttcaatcaattcttctaatgtagattccggacattcactttgaagacaaatcatagtctcagtccactcgagaggtaataagtatgttaatgctgaaatatgctgtcctaatttaatatagatcccaccattttttcttaaagcagccagtgttatatctgcagctttttgatgagttgtacttagctccttcaaatattcggattcatccacatatttggagttcaatgtccataagtataaaccaaaacaacgggtcatcgcaatagtgacaacgctgactctttcggcaattagaaatgtatcaatagtattctgtctgaagtttggacttacaatcaaaccaccaacaaatgcagttatagctaaaccacctataagatgaccagtcataggtttcttactaccatcatccttttcattactatctttgtgataaaatctagtagagtatctccttacaatacttgattgactattgtaagcttgaatatttttccttgccagacttactatggttttactactatattgaaatcttgcagctaagctaagttgattataacaaagatgttttagactagatcccaacatacttggtatgagccgtggattggtacttaagtatctgtgtaagtatagaaactgtagaaaatatattgaaaaccaatcgccgatacacaacgtttctcgatcacaaattttgattattcatgttaatattgggggccattgggatatacagcttttctttatcagcaatttttataaaactatagacatcaacaagtatctatgaatatctaagagtttttttatcaaaactctatgagtctaactaccgatctttgattacacgaatggaatgtgttattgattaaattaaagttatataactacagaaatccttgagttaagaaagcaaaaaacactaaaagcaagtattagttaaacatatcgtagattgtttgatcaatgaataatcctgcatacttctcagggtcttcagtatatggggaagttttttcattttgattggtagaactttcaaatggtaatactgttctactatctacgtttggcgtcccattcatggaatcaaaagctgacattgacttttctttatttagttcatttgacataaaaacatctctccaaaacacatcctcttgactaagagtagaaaagacatccatcgattgttgattaatatgaatatcattagttaatgaatgattatcataagaatcggaagtataggatggactattttcatctgctggaacattctgatggagtttttctctcaaaattttaaagctatttgattctttactaccatatctataattatcacatgtagttagtttgacaagattaatagcatccgattcatttatagattcaacaaaattttttaaacacagcattggtaagaatatgaattttttatccctgataagactaataatgaatgcatgtgccttcaacaacttccatgagtagaaatttttattagccaaacttttcaaacttggtaaatattccagaccagattctttgatctgtttacaaaatctatggagaattttaattttagcttcatgatctgagttttctatgttcttattttcatatttttcaatgtaaagcaaaacacaaatataaggtgagagatagaacacccatcctttatgcaacgatggtaaaatcacttcagcaattgcactctcaaaccccattccaaaatattgtgaacatttgcaggacataaattcgaaattagaaagaatgtacatccataaaacaattcccttttgtatacaaaataatgcaccttcagcgtttgagtttttttggaaatagagatagagattatgataaatacatgttaggaatcctgaaatttgaacataaattgaaaaatcccaaaattttgcagtctgttgttcaatggtatcaatcttcatgcctaaaatgtcctttaaattaccaaaattttcttctaactgtttttctattttccataatttactaagaataacttgaacttttgatttacatttgagattacaaacataacttgttaattcatttgccaaagtattgaatttatactgtagtttgatcttctcaattattatcttttcaatttcaaaatttttgttattggaagatgattcatcaaaatatggtaaatgagtatcaaaaaaatcataatcaacaaccttattagtaccaaataaaatgtattgttgtgtatctaaagccagtaatctataccaaatttttctccacagatgtccaattctacccttactgattaaaacgtcaaaatgttccggatctctgttaagaccgatatttatacccatttgaacaaggattgaaatgaaaatatgtgaatcattattgctaccgtcagctaaaccatcaacgttttcatattctttggttaataaagccagttgaaatacaggtaaagcacacctattcaataatttgaacaatgataaacatttttgagaaactgctggtatttcactatctagaggatttctaagtaaaagctcctcttctgaacttctttctattttttctggatttgaggagtaactcgccagagataattcagaaagcttcaatactagtaacattgtaccaagtgttgcaaagtttaatctattattaatatttagtttctcaaacttttcatcagaatttatgtcggttgcttgatcggtgtgaagtaaaatttgaacttcatttgtgaaaatatgttcatcaacatatggatgtataggatatgatctttcaaagaatcttttgatatataaccataaaatctttttactaggtaaaacttttaaaatgtctttcattaattccggaatattacacttttgtgttttagtaaacactttgaaattcaaatcagtttcttcaacaaaataaggatttaattctggattgtgcatattgacattcaaaggtataatatcatcgacccctaagtgtttgaaaaacctatcctcataatgattttcagtttcgttggtagccttgaataaactctcctttttttgtttaataatttgatctctaattgggcgtatcatcggatcctttaagatactagatagccaagataatggccccagattacttattctagcaaaattgtacaacattggaacaaacccatcgtggaaactcatcgaatcatttgagtctatgtttaagtatttgaagattttagcctcttctaaagatatgttattacctcttttttcagagatattatccatattttcattaggggtttcatttcctatattaacagaaccacgtgtacctataatgccagcatttttaatattgctggtaaaactaccttcaagcgttggccttcccatactatcaaacatattggtcatttttgaaagtctttctgcattcagaggctgcaaaaagttctcgtctttaatggatttaatagattcacagttatcatcttttaacttctgaagaatatttttaattgagtcaacatttttaatttcaactcctttgacttccgataaatcaacaggtaaagaatccaatggaggcagattatgaggtaagccatatttcccagtactaggtggtgggagtggtaaatttggattaatcaaagcatgtatatttctgattgagtcatttccaggtgtaccagcagatgttgataatctacctaaattattcaatttgtacagtttatcaacagtaggagatgtaccttgagtttcagctcgactcatctcttcataaatccaatttctatttttgaagtatggatttttgtcaagggaaggtaatttaatattagtttgcatattaagtgcagcattattaatatttacagatggtgttttctgagattcaacatttgaatacgttgttttctctccattaatataagcccatgatggatcactataaacacataactcaacatatttacccttgacacaacagccacaatagggtctttgtcgatcacactattattaaaaatataagttagtattcattatttcacataaaaagtaatttttttccaaaacttacctttgttttacgtttacgacacatcgaacatgataatgtcattctgtttctctttgatttagtctttttagttttgtcatcggactcagtaattccggtggaattagttttattatttttcacaatgttgtcatttgaattatcttcacttttagaagataaatcagacgctttccttttcaccattttgccaaactcttgtaaatctacgaaaaagagatgtagctaataaagaaagaaaaagaataaacgatgtcaaaagaagctatttttcttccaatgtaaattcaatgtaaatgcaatagaaatcgaaacaaccacaactccaacgggtttttagtcttttttttacatccgctttcttttcggagtttagataaaccccaataaaagaaaaagaaaaagaaaattttttatttcggataattacgtaactaaaacctattcctactttttttattttattaaaaatttataaaagttcattattttatctatgtacaattatatagtatgtagtatacttacagtattacaggaagttccaattatttagtgctgaatctccatcgggagtagctttatttgtttttctattgatgtttgaattttgtggattctctaatcccaattcaaaattgtaaactaaattatcaactggagtattcaaatcaacatttgtgaaatcaatttcattcaaggaattgtacatttcaccatttgtaatctcattattaacttgattttggaaaagagtattgaataacatattatttgttttgttattagttgaatccagttcaactaatttattcatgccatttcccatcaggttggattttctattattgttagaaacattattcattaggaacatattattattattagtattttgattgttataattatctgaactcagtccacgattaaccccaactatattatttgaaagagctccagcacctaatccaccaatatcatgtaagaaatcatcatcaaaaatttctggtaatgaatcaactatactatcaccagtcttattatcaatcttagttggatcattagctaaagaggtattccacatattattatttgatgtagtaattggcaagaatgagttgtccaaattagttggaattgaatttgataaattctccattaatctattaacttctagactttcatttatttgattttggatttggaattgatttgtagcattttgagctgccatattcatttgtagattcatttgcatatcagaatttagttctaaattattaaaactttcattaatttcataattccggattggttgtaaattcatcactggattatcaattatatcagaattacttataattggattaaaattaatttctctactatgattctgtgtaaaatcagtaactggcggtaatttagaagtaccgaatgcaatttcaaacgcagattttaattcattatcatgcttgactattggctcagtcttcataacagtatctggtgttgtatcagttgaatttaccttactaactggagttttgactttacttctagtattagctttcggtggactagtcttaccatttgcagagccaatcttcttgaaatttaatttgaagattttttgagaatttgttaaaatattatagaaaaatttaactaatcttttcaaaacccaagcgtaataataatttttagtcaatatttctaatctttcaataaaagtttccaagtaagtaaataatcttttctgtaattcagttgaatcaattttgttttttctcaagatttcaataacaattggggagttttgttgaattcttaaaattaatgaaattaaaaactcatgtgatctatgattgagaatcattaaatatggataaaccattaattcagttgcataattaggaaatgaatctttacatgtatccataaattgaataaagaatttgaagttttcaatcgataaaaggaatgaggattcaaaaaatgtttcaatatatttatgttgctttttgatcttttcaacagaattctttttttgacctaataatttactcaatttttgttcatggttaacaaataataaataattcaacgtaaatatcatattcttaacaatcaaatgaacttttaatctcataatttttatttgttttgaatactttttaatccaaactgatgaattttttgcactaaagggattgacaatttccccttcacccataatcaaatcaattgaaaagccatgttttgaggtttcagaaaccaaatcatttaatttgtcaataacagccttaatatcattaatcttaggaggtgcatcaacaacaaacaataatttcatccctttatatatccatttatagaaaacaattgagtctttgaaattttgaacaatacacaattctctttgtaataatttattactttcaaatattttctccaaaataccttgttcaataccaccaggtagtctacaatcccaagttttattgattgaattacccaaagttggatctaaatcaagttcaatcggtaaacctttagtataatcacccatacttaaattagcttcaattgtaatgaataagagtccataccataattttctccaaagatgtcttttcctgaatagttttgatattgttaatttatcatcatttgcatttgaataaaaatttttaaaattaagtggatccctatttaatccaattgtatatgccagctgaacaagatttgaaatataacttgaagaattcatattaagtatttcattagagtcaggacttttagagtttgaagaatttgcatcagtttgcttggttgatgaattattattttttgtatgtgagtcatctgtatcaaatccatcctctggtgataatgtagcatatattttaagatacagaccaacttggaaaataataattgatggttttgataataatttcagatttgcaaagatttccttgacaagatcaattaaaacaaatgaaatgaaattttcaggtttaattaataataactcgttttgtgataaaccatcaatagcagtttctggaagtgataaccaacttaatctaattatgattaaaagaagacaaagattcaagaactcatcagaatattgtgttgtaatcaagttcaatttaattttattattattaaaagtgaaagctgaattaaaattagattcgttaattgcatcagaagtgtaattagtattatttataattgaataaattttatttttaaatgaaatctcatcgacatatggcatattgatatataatttatcaaaaaaacgatcaactaaaagtccaacaattttcttgtttggtagatattgttcaataatagatagaacttgtttcgtattattataatttatagactttaattgttattggggatattgacttcagtctctttggagtatttgaaccttcaggtgtatcaacagttcgcttattactattctgtcttgaacttaatgaatcgggtttcattgcaattggcacaaaattatttaatttatctgaatacattggattaatttctgataatggagtcgaaggagctgatggaataattggtattttccttttagatgaagaagaagacggtgatcctgccggagaggagtatgaacttctaattgaactgatattcatcttcgacagtttttctttgaataaaagttttggatcatttgtcataagtggtgatatttttgatgaatttgaaacatctagtatattacttccattatccatatctaccgaatcatttgctattgttttacgtgaatttatacttgtagaatttggttctgattttgagcttatagttggagttttcagttttgatttacgttcttttttcaatggtgaagattgaggtcttgtattagctatagttgaaacattattacctattggacaaactccaataacaccagtaactggacataaattatgagatttcagttttacatcattcttttttgtatctaaaatttcaatttcattagaatcggagtttaggttaggtgttttgatatttatattgttcgtgttatttgtattgtgtaatttcaaagagttttcaaggaattttttcaatttacttgtatgttcagaagttttatcattaggtattatcgaagttaaagagcttatcttatatttattattataatttttataatgagacaacatatttttatctaatgaatttttactattataataatattcatattgatgtctcaattttaaaatcttcaaccaaagatcattaaggtacaaatcatttttaacaatgaacatccaagagaagacacttatttgataagttatgggtatattgtaatggatatttttattagcaatgaataatatatttgaattgaaaatgacatctagtaattcatcatcattaattgatgaggttgaagataaaggatttaatgttgaagaaatagtagtgactgttgaagttgatatattatttgatgtttcttttttcgatttaatttgatcctttaattgtgaattttcagtttcaagttgttttagtttagcattaagtttttcaaacttatcagagatttctttctctctttccttttctctctgtctttgcttttctaattccttttctattttcttatcattagcggcactattagtaatattggatttaatgttcttatcatcattaaattgattaaaatttttatcatttaattcatcattttgaggtggaggagttgaaggatgagcccatttaggttcaagataatgacaaagatgttgaacattattctttatacaattttgacattgaggcttttgtttatcacatttgacttttctccgacgacaaatgacacatgaaatgggcaccctattacgtttgcggggttgcttttccatttttaatagagtatagatcagtatataataaaatacaaatttgatctaatgaaaactgaatgaaatcaaggtgaaataattttttttacaaaaagatttcaagtagtctatactataatattactattacctgttagtaaagtaatattaacggttagtaatgatttgacagaaacagtttaataaatcaaagcagggtttaaaataaaataaaaaaagtttaatacacaaaaattactattattatctgactccaaaacaacaacataatattaataacaaaaaggcctataatagagagatagtggaaaaaaagaagccaaattcggtgatatcggataatgattttataattcactaattctcttctgcaccgccgcaaacctttccaccaactgcgccaccacatctggtaatggtttactgcgccattcgggtcctaaggagtggcgcagtttctggaaataagtctttaaatcattaccatcccattgactaggggatgatgaagatgtacatgatggagaggaagaagtttcgtttttgatgctatgtgttctctcctcagctagtcgatcccaatcaatattattctcattatcattttcatttaatctttcatgtaatttattaactaaccatttttgagtttcatcatccatattccttaattttgctaatgatatagctcttcgaattttattccatttatatcgacattgtatacgtgatcttgatccattcatcttttcactaacaagtgtccaattaatattatctccttcacttaaaactgcattttttaataaattttcctcttcactcgtccatctacttgtttgtctatttttaccacattttgcataattacgccaacgatctctacaatcttctggcattctacctaatgttgcaccaattaatttccacttagctccatgttcctcagctaaagatgataattgtttctcttcctctaatgtccaaactccccgtttctcaaatacatgatatgtacgcctaacatgtttataaagtgaagctctacctctatgtggtaaaactaattgtataccttcccaaaatccatccttacgtctttcattaccccaaattctttgaacaaattgttccctcgttaatccttctaatttttcatattcaataacaaatgtttcaattgccaaactttctttatcactaaatgctctccccccaacaaccttcttactactcttttcattttcatctttttgttcatcttctaaaccttgtcttgcagttaatgctgcaagtaagattttctccttctcttctcttttactcttctctctttcagataatgtatgatttctcgttatattcgttgaattatttatattaatattactattgttatgatttttttgccattgtacggcggcaacagctctgacagcctcatccgctgcatcgttaacagctgccacaagtctagcttcttcaacatgtacatcaacatcaacattaacatcatcatgtatattgttatcattatggccattatcgttaacttcatgaacactatctatattggatagtacaggatcaacggactcttcaacagttttcttttcattttttatattatcatgatgaacattgttattgttacttatactattattggtattattattgattgtatcttcgttattagtaacgtttgtagtattacctacatcattattaacaatattatggttatttccagtatcattaacattactctcatgttcaatttcattatcattatcattatcattttcatttaagaatcttgatgtccattgctggaattctaatcttgagatttcttcatcttctttattcttaacatcttgactgatattaaacttaatgtcctgtgaattaactttctctgcattgactaatttttccacttccattaagtcaatatctacatctacatcaacatccacatctacatctacatccacatccacatctacatcaacatccacgtcaacatcgacatcatcaacgttcacgttaacaacattattaacaacattagcagctatttcctgaatatcgtaactagtttcttcctcttccatgttggagcaataatttaatatttaaccccttatcttatctactaaaataatcaaatccgggtaaaatatgcatatagtaataaacaggcaatagcaaaaataataagcattcaaaaaatttacctaataatgagcacataataaatcatccttagtaataataatgaaaatttatcacctatttaacattgggcatttttactaagcgacatttttcatgtcgtgttgtagttacatactgaaaatttgattaatttgatgttcaatttaaattttacataagttttaattaattataaaatccaaacagtttttaataaagtaagtaaatttatattagtttaataatgatgtttaaatatcataattagaatttatcaaaaccttttgaacctgctgctgaagtaacctttaaaacattaaatctaacagtctttgataatggtctacattgaccaacggtaacattatcaccttcttgaactctgaaagctggagaaacgtgagctgctaaattcttatgtctcttttcatatctgttatattttggaatgtaatgtaaatattctcttctgaataataatagttctgtgcattttagttgaaacaacgacaccagataaaatcttacctctgatggaaacatcaccaacgaatggacattttttatcaatataagtaccttcaatagcagaagctggggttttgaaacctaaaccaacatctttataccatctcttggttcttctagttgccttagcctttggattggtgaagatatgtggttgcttttggaaagctttttcagattgaacggttaattcagtagtcatgtttactctgataatatactgctgagatttgaaattaaaataattagattaaatcaaattaaattagttgaaaattttagtacatttaaaaaagtttcaattgtaaatgattgtaatgatattatcaccaatatttctcacccactctattctctctcagatttgaaaaatttgaaatttacccttttcgctatactatcaaattaaaacagtcacatttttttcccacttttacaaatttctcacatttttcacgcttttcttaacttttcaaaagagacgcactgaaaaatgaattattatttcagtaatttttacttattaaaatagaaaaaaactacacagacctcgcacagagcacgtgctgaaaaaagcttgagagggttttaaaagggggctcaactttatatactatttataataaaaatgctaatttttcaccattttcaataccaattttactaattaaagcttcattatctaaaaatttcatatcactaaattcaaatcctggtacaacaatctcactgacccataaataatcctttgatgaaatttcttcaccttcaattggcataatataacatcctttataagtaccaggttcaacaatccattgtgttttttcacctttctctaaatcaaatccaacaataaattcttcaatttcaccattctccttaattaatatatatttacctctaccaccttgtaaaatatgaatggttgttgatttttgatttgtatgaaatttaccaattgatgattcacatgtcattataaaattaatcgctgtagttaatttatgatcttcaattaccttttcactacgatatgtctctttaaagaatccaccatttggatgtttctcaagatttaaatcatttgctaacttaatgattgattcatcgggtttcgtgatgtcgttatcaacgtatttaggttcactgaatgtcatgatcaagtattgcccctagtaagaagttaggaataattataaatataaagggacttcacatttagcatgcatcagcgcgtacaacttctaatattacagtttctattattattgtattcaatttaaatcctcagtgttaataaaataacggaattttatataaaaaatgacctaccccagtaaatacataaatacaatataaaatacaaatataaataaattaaagaacatgttccttttcaaaaaaattgatttaatttggagtcaatttcttcatttgagcaccacctaatgaccaagcatggaataaatcaactaattcattattatcatgtaatgctaaaatatcatctgctccacctctacttttaccaccaacaatgaaatttggtacagtaaatctacctgtttgttcaccaacatgattttgtaattctttaccattttcatgattatcaagttcaattataattggctctggtgtaatatgatattcagtttttaataaatgttttaattttttagagaatggacaatatgatttagaaaatataacaactggtgatttatctaggatcttttgatattcgtgttttgggttaaatgatgatccattatcttcacttggtccattattttcagcattttcttgtgcttccataacttgtttatttaatctattaacactatttttagtatttgaagttttctttgaattaatttcattatcatggatttccttttgatcattcgatccgagaatcttatctgccttaataccattagtgacatcatcatcatcttcaactactttatctttattgttatatccaacatcggaattcttgttattagcattgactttaatatcagcattatcggaattagctttgacattagacttagctttagccctttccttagtgttagcattaacagataatggatcccctgcaactaatgggattttcttctttaagttcttactttcaacattctttactttactctcatcaattataccttctttacctgtaaccatttcattagcgttaataacttgagcatcggttttttgagattttgatttaacctttctagtattatcatttaatgatgtaccatcaatatccatgcccttagtaatatcaggtataacaatgttattatttttagttttcagggtattatttgttgaaatgaaaaggaaaaaaagaatgaatacagctgcagatgcagtaagtaacatctttctctttcttgcagtgatagagatacccatattgtatgatattcagttaatttgtgaagtaataaaaagaaaacagaaagaaaacagacagagatcagggagtcatttttaaatttcttattgtttcgtgcctttcggtttcgcctctttggggtaatgaaattgaaatcaggatattaaaatattatgtaatgttaacatatcagatctccagatttgtttataatattagcctttaaatagttttatataatgtataaataatatagtaataatgatagtaattgtactagtaacaaccacataatatttttaatctgttataatctcagcatataacattctctttaaatcaattaattctaattgttccttaaattcatcaaagaagaaaaaatcatttggtatactttcagcatttatctcagtcgattgatcacgaaactcataaacataattatgttcaagacaatcttcaattgtcattctctttgcaggattaaatgttaaagttttttcaataaaatcaattgctaatggatctgcatttcggaaaattttcttcattggtatcttacgctgattcttggtatgtgctctaatagtaatcttttgctctctgtaatttaatacattccatatcctcctcatttggagatcctaatacttcaaatattaataataattgatgacgataatctttaccagggaaaattggttcccttagaatcatttcagctaaaatacatccaattgaccaaatatcaattgcttttgaatattgtgctaatgataacataatttcaggtgctctataccatctagttgcaacatattctgttaaaaaagtatttttatcctttgttatatcagtttcaaatctagctaatccaaaatcacaaatttttaaatcacatttttcattaactaataaatttgcaggttttaaatctctatgaattatatcacaactatgtaaatatttaacaccttttaataattgatataacatataaaccatatgattattacttaattgatgagttctaataactgtatgtaaatctgcatccatatattcttgaattaaatatacatcattgaaattttcaaagcttgtaggtttttgaatatctaaaattttgattatatttggatgattaaaatgttttaaaaatttaacttcccttaaagttcttaagcaaaataaatcacgttcaaatggttcaatctttttaattgcaacaatttcttcactattatatttatggccaacagcgacaactccataagctccctgtcctataacactaattactttataatctctaatattaaatacgtaatcttgtttttgcatagttattgatgtaaccttcgttgattaaaaaagataaaagaaatttttcataaatccaaacatatttcaataatcatatatatatatacaacttagctaccatttatattatataaatcacacatttcaacgatacactgccaaagaagcatattgctattgttactactccgtaaattaataaaaaatcgtttttctgtttcacatttgcaacatgaaacatcgtttaaaatttttttggaaatttctgattcacgtgatttatacgaagttaatttcaattttatacgagattgagttctatttccatcatcatgacttttttaatagtttatatgataacacgtttctctggacaatggaacaaatgaatcatataactgcactcatcactggtacatctggtaatttgggaactgcaattgctaaaagacttattaaggaagtcccacatgataaaaaattaaccattattgtcacttcacgtacgttagctaaagcaaatgaaacaattaaacaattagttgattataacaataacgaagttaaaagatcaggtattttagattttgattattcattattagattttactgatatggtatcaattttatcatctgtttatgaattacagaaaaatcataaatgtgttgatataatctatttaaatgcagctcaaggtgtatatgcaggtattgattggattggtgcaactattgaatgttgctcaaatccaatcaaaggtgttacttatccaacttataaaattcaaaaggttggtgttaaatcaaaggataatttaggtttagtatttcaagcaaatgttttcggtccttattattttattcataaattaattgaatataaattatttgaaaaatctgataatccaagaattatttggattagtagtgttatgtcaaaaccttcatatttatcaatgaatgatttacaattattaaattcaaatgaaagttatgaaggttccaaaagattaattgatttaatccatcttgcaacttacaaagatttattacaaaaacataatgtcaaacagtatttaactcatcctggtatagttacctcattctccttttttcaattcttaaatccaataacttattatggtatgctgtttcttttctatatagctagatttttaggttctccgtggcataatattcatggttggattggtgcaaattcacaaatatttacttctttatatgctgatcctctgaatggtgatatacagtcagttaaatatggcagtgctagtcattggaatggtaaggaatatattaaagttgatgaagttgacgatagtggtaaagctgatgttttgaaatatttcgatgaactaactaatgaatgggatgaaaaattaaaagatcaaatagtaaacactagaactagataaatagagtttttttttatttatttttgaaaaaaaaagttataataaggtacaaaattataatagaaaacaaacgaatagttgaatttaataagcaacaacaaaaaaggattcattgaagttttagtgacatcaatgatccaacaaatgttaaaattaaccttgctctgacttcattaatatcttctggaactaaccaaattaaagctcctaactttctagcaatagaaatcgctaatcttgcatttgcatatctttcatcttcagtattaccatttgtaactaaatcataatcaacatatcctggttttaatccatgtaaaacatctagtaagaatacaccgtttgctaatgatggatctttaaatgatctaatagttgatgatttaccacctttaacaaccatattattagcccatttaagaatatccatatcagaaacttctttaccattgattgataatgaacttaatgtattgtttatatttcttctcattaattgccaaactaaacctaatgttaacatcttattaccatctaaaatatcagatccttcaataccaactaatgaaaatctatttgccttaccaatagcaacacaataattagtattttctaacgctttaaatcttgacatttcattaccatttgtaggtttcttattaatatgtttccagtcaacactacctggcataactttatcatatgcttctaataaaactgtaccatcttttaaatcttcgaaaagtgaaacaacaggtggattaacatctaaggaatttaaccataatgtgaaaactctagcttctctttcaccttctgcatcgaattcttcaatgtcaggcttttcttcttctgctattggatctaatcctggatgtgtgttgaataaatgtgcaacaaacgctaagttcaatttaggattacctgcaactaatgattttggagttaaatattttctacattgtaatttatctgcattcttcaaaactaattctgctctgtctaataaattagtttcttgtaacggagctcttgaacataattctggagctaattgatttaataaaattgtataattttcaccatctgcaacatcttgtgagaaattgtttactcttctattccagtttgctgcctttaaatgatagttgaaccatcttaataaaatcttctcaggtggtaatcttaagaattgttctaatgtttcatcatcttctaataatctgtataattccggatgtaatttaatatcaattttactcaataatccacgtctaataatttgccaaattaaacctaaaattaaatgttccttaccatcaataatatcttcagaatgaacattaacaacaacacaaccaatagccttagcggagtttaaaacaacattagcattttctaataatttgaaattatttaaaggtttaccatttttagaagtatttaaaactctggtatcaatagtatcaggaactgaatcattaattaatgctgataaaactaaaccatcagtacattcatcaaataattgaaaattatctaaatcaaatggtaatctattaccaaccaattgatcaccaactaaaactgaattgatatgtcttgtaaattcaatacgttcttcatcatcaattgtatgcattgttctaccagatccaataacaaccttagctttattacgaacaaaagtttcattactatcagaacctgccattgctagctgatgcaatattattatttgatacagaaccagaacttctaacagatgctttagactttaattcctttaattttgcatttagttcaacaaaatcttctaattcaacatgacctgatgcatcaactgaaacatttttcaatgcttctctcacttcatcatatgatgcttttccactcttagagacgctatcaataacttctttcttatctgcccatccattttcatcaatatcaatgtttctgaaatcctcaatcagagagaataactcagattggtctaatattggatattttttctattaaaaaccgtgattaatgttagtaatcttatcaattgtgcaatgtggtgaaagtttacatacctgtagctttatgacattcattgtagatgccgtgttaactaatcatcaaaaagaacaataattgattaattgaatccattgccaccttaactaatggatcttcaaaattaaaggtttcgctctcataagaaacaagcccccttcataaattgaaatgtaaaacacaaaagagatcaacttctattatacttaacaatctatatttatctttcattcggatatcaaaacattaattttacaaaccaacttacaaaattatataacaacaatacaattatccattgaaatgaatcaaacattacacctcggtgtttaatataaactgtgaatcatcctgcaatagatctttaacacgcttacgtaacaaaacactaacagagttctctaatgctgtagttctcttgttgagttgcttgttacgtctcatgatatgtgatatactcttcaaagtatcctcatcaaccaattgtcggctttgtttcaaaccctcccgatattcacgttgcatttgaactaaattggaatcaaattcatcatccatcgattcccacaattcaatttcctccatttctaaacttttaagaaattcacttgtattttggaaactctttgacagtttactagattgcagtttgttaattttaagttcgtcgggggatatctgccttaatttatttttcataatatacagtcgtttttccacaggtgtttttggaagttcagatcctttcagatctgtatcttgataattgtcattacgaaatttgtatcccaacaaagcccttgcttcatcatcggatatcccaggtatctgtaatataatctccttgtccacatggttaacactgtttttcttttttgaaacaaattcttcatctttagtattgttttccagcttaaattttgaaaaatattgttttgtcatcatctctgattgctcaaatgctttaactttagaaaaccttaatgggtggttggtactaaaagttttataatcgtactcattcatatcactcacagtttcatggttcagaatcacactattactcttgttcataaatgacatatcagtagatagtgatgtttctgttgaaggtgattcgttacctactccggaaatagttccacttttaggcatttgatgtctttcagaatgattactgtaaaatgtaccgtcactactcttcttacttttgatacttattccagctcgtatttttgcattagaaccatgttgatttgtactaggagaagttgaatcgtttgggtcaaaatatgaacgtttcttagagggtgccttctttaagctctctaaatatgaaaaacttgtattattgtagttggtaacttcacttccttgagttacgggaagagaggtggcatggttagcttgtttagagttttgtaccttagagtggtgttgtacatccatgttcatgtcttgttgattgagtgtatgtgtatgtgaatgagtctgtttttgtgtctgtgttttggcagctgttggtctactatctgtatgagttgctaaactgattttccgttccataccagctgaaacatgatgagagtcaacatcaacagtatcatcatcattatcctcaacattcatgtcaaccctgtcagtgtgattgtaatgtgagatacgggatgtaatagctcgaaacattttccttttcccctctaacttcggtctagaggtagacatatcttctatcagccaatgtttgagctcaaacgatcagattatagtgtaaaaaacaggaagaaaaacaagtaacaaagaaagaagaagccaatgttagcaggggattaggaaaacatcataaatattttttcttatcaaatttcatgttgcccatcttcatgacttaaatctgtaacagttcttttatcttaacattactaaagagttaaatatgatttatacacaatatataatacaaaaaagtcattaaatgtgtctaaccatacacatacaaccacatccactaggacattggtccattttatcctcttcccaccaaataactgcacatctatcatgcattatatggttacagtttgtacagactgatagtcttttagtaacagcaagatcacaataagtacatttgtttttatcatggaactttttccatacttctctaggagtatcatcctcttctgtcctacaatcatcacaccatccaatatcaccacaatgttcttgaaaatcggattttttgttttcgttttcatcagttgaatttgtgttatagttaaacttcaaaatcttgatcctatttgtaggtaacccccaataaaacaatatagatgcatactccgcacggtattctttcaaattattaatattgacgaatgatgcaatattggtacaatattgactctcgtaaagatctagctctaatgtatttttcatttcaatattgactacaggcatttgctctgataacattctatcatacattctcattggcgtttttggtctagaaatagttgaaacagttcttgttaattttggaggaatgtaaacattgttgattgtattggtttgttgattaaatgcattactgttttgtagtgatagttgattataacccacattcgaatttgtgctcagtgtcaaatttacaccactgttcaagctactagtagcattgttttccttatccaagtttccattaaactcagcaaagtttgatcctttatgtttaatacctcgacgattgtgtgatttgttattattgctcaaattattatttatcatcatatcaccagcaggtgatgagcttttgaaacttctattgtcatattcatatgaagataaagtactaattgatggcattctatgttgcagaacattactactcaaactggctggcataagtgtagaattcagcttattgaaagaaacagtactttggtttcttatcaattgtgaacctatactaccaaaagcacctctactcattgaactgttcttctgactggaagttatactggggttttttcgtaaaattgacttttgtccttcaatttgagttttgctgctgttgtaaggagagttaatcggaacatgggtatgatctctaataacatcattttcaaacaaaatacacgataacattgcaagcatctgtatattatttactttttggaaatattcaaaaatattctttactaaccacacactaccaaatgggtgatacccccaataaaatctatagttacgaaccaagtttggatcatttatctcattaccaattttatccagcatatcaattgtggtttctgcatctaatttgacatctttcattagaatatatgacaaaatcttccaacaattactaattgtagtataaccatatttctctgcaactattgaattgtgttctgctaataaatatggatcatcacccaaaaccctatactcatacgctaattccatcttaataggtatcaagtttctaaagtcatatatcttgacaacatttttggatttgtgactcttagaagtatttgtaacatgcgatctttcagttggtgcagacattggattacttctagcatttgaagaatactgtttggaatcaatattattaacattcatatttctcaataagtttggaactttagttctataaagtctatcagtttgaaacatctcaaaatcatttgacaaactatcatcagattgctcagaatcagagtcgtcataaccggataagtttccatcgattacattatttttggataattgtaaaccgctggacaccggctttctcttcaaacttcgtactaaactgaaaccttgttgtccaaattttattggttgttcagtatctgtttctcttgatataaaaaagcaaactaaatgcccacttgaagtccatattgctccacaacccttcgaaacaggtgtactatcaaatggtgcccttttcaagttattttgtgcaataattacacaatttgttttgtcatcttctaattccaaatctacatcatcttcttcctcttcatcatcatcctcttcacagttcttttctttatcatcattactgatcgtactctcaagatcagaaacatctaccaacatattatttttatcatctctatattctaaatcatagggatctatactttcttcaagttcaagatccaaatccaccttctctcctaacaaaaatctcaagcaaggctctagacagaatctcttatttgaacaaaacttattggcaatctcttctaattgctttataatttcttcccttttctcaccatttagctcatgtgtttccttcaatcttgaatgtaggaactgcactgacagatggatatcctttgggaaagttaaactctactcgcataaatattaaatcatcattattttcagaggaccatggtccattaagtgacaaaactaaaacacccgtagaaacggaaattctttcaaatctgagtttggggaatttctggcctatattactgaattcttcacccaaatttaatggttgactactattatcaccatagttgatactatttggatcattgtcaccattttgaaaaactgattgaccaaatctaatacctgaaatccagttcagatggttaaaatcactatcagatctggagctatcgtcacttctatcgacaggcaaaaacagtgacttttttcttattattaatttgttttcaccagtaatctcaggttctggcctatatgatttatattcaaattcaggaagtttgacaccagcaggtaatggctcatttcttttgtaatcaaatatttcgtacatttcatcatttagtggccatagtcttaaatctttatcagatccccaagtaaccagttgatattcactgtcgtttatatcagaatttggcgtatgtcgagttctccaaacaaaatctttgaccgttccatgatgacctttaaatttatatgatgcgtttaaccctgattcaccaaccttatctttataattaaccatataaattgaattatcaccgcctcttagtggcataataccacatatgtgatcaccaaaaggtacatgcctagcctttgaaacaggaaaatctgtccgtatcgtatacacaggcttttcatattctttatcaaatgaccagaacttcacggacatatcattagaggaggatatcaattcatatttgttttctctactccaatctaaaccattaatcttggcatcatgtccttttatatttttcattggaattgcaccctttcttctatcccaaatttttatggtattatcatgagaggaagctataatgttaggatccttgtagttccatttaacttgagatgcagcagatttccaatcagaccattgttgaaccggttctttaggacaacgtaaatcccaagcacagacaaaagaatcaactgaacaagttgctaacatttctggattttgtggatgaaaatgtatatctgtaatagctctactatgtgaatgtaatacatactcaattgcatcattggaaggtctggctaaattccaaaccattgctttttgattagatgttgaaacaacccaagacggttttgaacgatgtggagaccattgaacatctgcaacttcccatgaagtttcatgacgcaaccatctaggagccgcaaatggatcatccatatcaattaccaacaatcctttccgtccagctaaaacagcatcttttccacaaggtgaaattgacatgatggacatataattactgtccactcgtaaagacaacggattttcaaatgttatcgagtcatagggcgatttaatcctggacatttcttgatatgttggtttgtgctttatgaataacagataacgtttgtagggcctatataagctaaaggccagaagcaggttgtgtccatgttttgggtaacatgaattttgtttttttggtgatttatggaatttcctaattaggtaataataaaaatttctagacaaataattgaatattttaaagtcagcaagtctattttatgcaaataaaaatcaatatatagaatatatattataaaggtgaacttttagataactttctgtaattttgctaggtatattaggatacgtttgtgtgctaatctagaaatttcctaccagatcagatatttttctttcatgtattcataccatttaaccagattcgaatattcttagatgatatacccatccagtggttccagtgaagtaaatgaacgatgtaaataagtaaaaatcggcaattgttgtataatcagttgcaacgtaagatctttcataatgtgcattctttacatattgtaactgctttctcaaagctgctagattcttcaacttctcatcttcatttttggaaaaaaatatgtgatcaacccagaaatcaataatattttggtttatcaagaatatatctagaatttatctctagttgtttttccaatatacaaatcgtcttttaagattttcaatatgtattcgacaataaaaataaattttttgagtctggatgtatcagattataagtatgctgaaattcttcccaatcgaaatccaagttcaaaatctttaacctcttcaaaaattgacttcaacatctagttctagatatttgatcaatataccaaaccagtatgatcttgcaaatcttttatgaatttaaggtgttcttaatttcatcactataaaaaatattctctttgttgagggagaactgatcaatgtaaaaagaagttagaatcagtatctatatatggtgtaaacgatcaggaaatatattgaagatttaacacggatatagatatttcttatttctgttatgttatgctaaattaagaacaaacattctttaattatgaaagcggaagtagcatgtcatttgttagaactgtgtcgtatagttcaccattactttatccatactatatgagaaaagagaggaactgtcagttgaatagagtggagttaataaaatcaaaaatttagagttgacaaatttgaaaaatgttttttttcagaataaaacttttaatttgtttacaacttcttcctttctacaaaccatttttctaatggaaacaaccattaaaacaaacagaagaccagcaagatgccaattggatccgtcaaaagtttatgaaaacagtaaacctgaacagtcagggcaaagttttaatatatggtacagtaaatggactggtggtgaaacaaacggaagagcagctatatcacatgctaaacatcgttgcaatgttaaaagggatagtggatataccaaggcggataggtatactgaagaaggacagattaatagaactaactatttttgtttgtattttgcaaggggatattgttccaatggtaaaaattgtgaatacttacatagaataccgacagaacttgattttttctctccaacagtagattgttttggtagagaaagattcaatgattacagagatgatatgtcaggcatcggttcattttcaagagtgaataaaacattatatgttggaaagatatcgaacatgaaagatattgaggttcgactgcagaagagttttggagagtttggagagatagcacatatcaatacacaagtcaagagtaatgtggcgtttattacatataaactcgaaagtcaagcacagtttgcaaaagaagcaatgcattgccaaagtattaatcccgacgataatactgaagttttgaatattagatgggctcacgaagatccaaatatgaattccaagaagagaaaacatgaagatcaaaatgaattatctatggatgctgctaaaaaaatattgatgcatttaaagaaagagcaagagaacaagaaacagaagatcgtatctaaaagtatctccaataatgatagtgacaatgataataacaagaacgataacaatgatctgaaaaaacaagaaatgatgatttttgagttatacaagaaaatgaaagccaatgatgaaatttgtggtcttgttagtggttacagtactagtgatgatgaaagctaaagtaaatttgaaaggttgctgaattaaaaagttattacgtctatacatctagttcatgtttctatgtttctaagagagtctgcatttacgatgtttttcaaatcatcgggacatttactaatcggactttttgaaattatggcctttagatcagaaagaacatcaacatcagtactagaattccaaaaagtaatagccataccataattaccacctctaccagttctaccaattctgtgaatatattcggaaatggattttgacatctggtaattaataactaaagatacaccggcaatatcaatacctctagctgcaacatccgttgcaatcagaatatcacattgttttgttttgattttcataattgcatcctctctttgttgttgagtcttggaaccatgcataacgataggattgaatcctttattcactaaaaactctgctaatgtatcacacattttttgataattgacaaatattataataggaggtgtataattgtataacagttttcctagtatatccatttttttcttatcatcttcgggaacttgaattggttcctgtctcacagtttcgactgcattatttacattaccaatagttactttgacaggatcaatcatatattgatttaccattttattgacactaggtggcattgtagctgtaaacatcatagttgttctttttgggtttttaattgcaaatggattggtatgaccttcaggaagttgattgattaaatccaaaaattgtttttcaaatcccatatctatcattctatcagcttcatcagcaattaaataaaagcatcgacttaactcaagtatattttctttcaaaatgtcaagcaatctacctggtgtcccaaccaaaatttctacacccttttctagtttttcaatgttagattcatatgtgtgtccaccaactatagatgcaacattgaactgtagtacttttgcaaatttctgaaattgcaattctatttgttgggccaattctcttgtaggaacgacaatcaatacgtatggactttcactaggtccaactgggggaagaccagaaatatatgaaattgccggtattaaaaatgctaatgtcttaccagaaccagtttctgcaatacctaaaacatcattaccatccatagctaatggaattgttgctctttgaattggagttggttcattgtaatgaagaattcgtagttgatcccgtatttttggtaaaatagatgtctcgccccatgatctaattaacttagaagtattctttccttttattgaaatatcaaaatcttctttcataattctccaatctctctcgttcatcttgtctaaaggtttttcactccaatgtaaactatttacgttcagttcatcacctaactttctctttctatatggcatgtcaaagagatcatctttttgagactttttaggattgatgaactcataatatgaatcgttggatgtgtcttcagattcatcccaatcaaatctgaactttctatttgaatatggtttgactgtgttctttggttccttttgtggtacttcttcaataaaagtctgtatcttttgttctatttttttacttggcttcaccaattccttcaatttggaattcttttcctgttctagcttttctctttgtgattttgtaagaaatctagctttcgttaccttgggatgcatttgaaacttgcgttccttgctttttcaatttcaaaagctcttctaaactaagtggtgcatcatgagctggcatctcaaataccccttaggtataatgtaatatataaatgtacttgcagaaagaattgtctactaagttttcggtcaactttgtgtcattattttagatctttaggcatttacacttcaaaaatgattacgtaaagatatcttaagtttatgcatgcattattattaagtggaattatacagaaaagagtaagttataaagaggattaacgacgtatttttctattaccgtgaaattgtttgacttgacggatagattctgcagatgctctatctactgaatcatgtaaagcaagaatttcacttttgtttggagtttcctttggaagtttcatattgataactttttcaattcttaaaattaattctaaatcatattgagtaacaagtgaaatagatttacctgatctaccagctctagcagttctaccaacacgatgaatatatgcctttgaatctgttggaatatcataatttataactagatcaacagatggaatatctaaacctcttgctgcaacatcagttgcaactaaaatgtttttatctcctgatttgaacttgtttaatgctcctaatctttgtgcttgtgaaagttgaccatgtaatggaattgcagagaatccaagaatccttcctaataatgagatattttgagcatgtgcacatgttctagtgaaaatgataacagatttcccgacattttcatttagtatatgaacaaggtatgtgtttttgaaaccatcaggaacaaccattaatgtttgaattaatgtttcaactgttgaatatttattattaacagcaactttcactggattatgtaaagaagctctttgtaacttatcaattttagatgttaatgtagcagagaataaataagttgttctctttcttggaataatttgtaaaattttatcaagaacaggaccaaattctagttctaataatctatcagcttcatccataaccaaaaatttcaatgctcttaatgaaaaacctttagtattttccaaatgatccattaatctacccggtgtagcaacaataacatgaggtttacgcatcaattctctagcttgttccatcatatccataccaccaacaatagttgtacatcttaaacccatatttgaacctaaagcatcaaaagtttctctaatttgataagctaattctcttgtaggtgctaaaacacatgcaaaataaggtgtttgtgcttcccataaagcttgtaaaataggaattgcaaatgctgcagttttacctgaaccagtttgtgctataccaataatatctctaccttctaatgctggtcctaatgattgtgcttgaattggtgttggtttatcaaaattaagttgtgttatggcatctaaaatatcctccttcaatccaaaatctttgaaggatttctttaaatttgcttcctcttcatcattgttttcagtttcttcagtttcttccttttcttcatgatcttttgattcagagtctgattcggaatctgattctggtttcaagacatgtttttcttccttgtttttatttgaagcagctaactttttcttcaaatcatttatatatttttggtttattttcttttgtgctttactgacttttcctgacattgttgcttaccttggtttatgaaaggttcccttactaatatagaagctgttattttaatctgtaactgaaaaaaattttagaaaatttcacaatgcgaataatatttttttgaggcaggtgaaaaattaaatttatttaaaatttttttactgatttctttaaatttctacttgcttacagcttgttcattgtaagaaccaaattatctcaataggaacacatagtcacaatgggtagaagaagagtacgtactaaagaaatttactgatgaacttcaaccattgaataaatactaacattttattttataatacagcaaaagaagagaactcacgtcaagaaatccgaagaggaattgaaaaatattccaagatcaatggttatccatctagggacagcattagagaatcacaccctttctaaacttgttagagatacaagaaacatgatgcaaccacatacagctattcgtttacgtgaaagaaaatcaaataaattaaaggatttcgttgttatggcaggtccattaggtattacatatttaatggtcttttctcaaaatgaaaagactggatcaacacatttaagaatgtgctcctatgccaagaggtccaactatcagttttaaaatttcagaatattcactttgtaaagatgttgttagtatacagagaactccaaaatctataagtgcttcatcacatgaatttttaaatccaccattacttgtgcttaatggtttcacaaatccaaaagatgcatctccagaagagaagcttgttgttacaatgttccaaaatatgtttccaccaatttccccaatgaatacaaaagtcggcacaattcaacgtgtgcttttattaaataaagataaagaaactggtttaattgaacttagacattatgttattgatacaaaattagtggatgtctctaaaaatgttaagaaacttatcaatattaagagtcatttaaataaaaaattaccaaacttatcaaaaacaaaggatgtagcagatattattttagatccatatgcacaagcaggatttacttcagattcagaagttgaagaagatgccgttgttgaagttagagaaattgatgactcaaaacctttaactaaacctgtacaaaccgcggcaaagaccggagatgatttagatgatgaagaaatggatcaagatgaagatataactaaacaaacagagcaaaattcaataaagagaaagaaggctgttaaacttacagaaattggaccaagattaaaattacagttaattaaaattgaagatggtgtctgtaacggtaaagttctataccattctcaattctccaagacaaaatcatgagatgaataaattagaacaacaacatgctgttagaaagaaggaaaaggaaaatagaagaaaagcacaagcagctaatgttgctaagaaaaacgagaagaaactcttaaagaaacaaagaagagaagaaagaaagaaagcaggagaagatgttggtgaaagttcagattcatcctctgatgatgatgttgatatgaagattattctgatgttgatatgtcaggttcagaagaagatgctgatgaaaaattatttgatgatgatgaatagttggataaatctttttattgagtattctttgttcatatcaagtaaattaaataaatgtgtaccgtgtaatacaaaaaatataaaatcagtaaatttagagtatggcttataacttaattatcaaatttatacacttatatagcataaaaataataacaaaaatcaaattgaaacctaacttcaatagattagctatacaatgttttatcaaataaacatcaaggacaatgattcaattatcataaaatcaaattcaaacaaaaacaaactgagtaagattgaataaaaagtaagacgaaagtaagaaaaagaaaaaaaatgggaatataattttgaatttgaacttatatcaaactattattttccactctagcatttctacgttccgctgaagaccatttatcaacattaaaaacagtgtaatcaccaatgctgaaaccttcaggatgtgaaactgctgaggtagaaaacaaccaatttcgtcctgatttttcttgtttccaacctttttcagttaatagttgatgagcaacatttctttcctcaattgatcttccataatagtatccaaagaataatgattcataatcaagttctgatacactttttctcaaatcttttgaaatttttattctattccaagattctgcaagatgaatagccttcaatcctactggatactgtattatttggagtgtaattaatagattggaatggatcataaaagctatttgatttgtttttactagatgatattgaaataataaatgattgaataccaggtggtaaaaatctaaaaccatcagtagcagcaccgagttcatgagacttatcagttacatcatttgcagataaaacaaaagattcaggtgcagattgtgtattgggtattcctatatcattgtcagttggaggcaattgagctgggaagttaatagatgttaaaccagtagaagcacttgaaattgttttattttgtatcactgggtttgatgagtccgatgatgatggggcagtatctggttgtatataagatgttgctggagcagaattttcttcagatattcctgattcctgttgtaatttatttgataatgaattgacgttattatcaatttgagtgtcagttaagtcttttggtttttgtttctttaattcttccaatacacttacagcgttcaaagcatttgaattaaccgctggtttatcagctggtacagattctttcttcttagctgttacaatacttgaccacttaagttctgatgtttgtggaactggtgcaggctttaatgtggtcaaagtcgtttgattgtttgaagatgttcctatagattgtatcacaggtgatatatctatagaatcatttttagtaattgcactaattgaagaaggagtagaaacatttgactgcgatattccgtgattttgtttaacatgagctgaacttgatcttgaatttgaattggtagtactatcaactgaagtttgatgaccaattgaacgagacctttgggaagtttcaggtattggagaagcttcaggtactggagagtttgaagattcttcaaggaataacatgaatgtcattgattaaagcttgatcagcatcaagatctaagttcatcataaatagtatcatcaaacataaaatcgggacttctgttttcatcaagataatatgtgatatcttcacttatgttcataacatcatcaactgataatatttcattttgtaataatcttagaacaatttccaatttttcagtatgccaatgatgatctttaagtaattcttcgaattcttttttctgttcttcattatgtacatttttcttacctttttttgaaggttgtaacttttcaatttcagcttcaacactttctatctgttgttgtaaactatctaaggattgtttaacaaattcaatagcttcattatcgatcgttggagtatcaacagcagctaaactttgatcagagtatgctttggttttacttcctttttctaccactttatacttttccatagcaatttcaactaaacgacgatgttcaagtaattgatctttatccttaatttcatttgcagcttgccaatttttaacttgttctctaaatcgctgtaatttcttgatttctttctttaaatcattttcaagtttatccttttgtgaaccacttgcattttcatgtctttcatatagtgtatcaaaaatttctagaccttcaagaatttttttaaagactttgtccatctccctattttgaaaataaaaagtttatatgaatgaatatatagtattcatttataagtttatgttagtatgtactcaaaatcatgagcgatcatccataactgggattatttcttgaaattatcatcttcgtagagggcacatttaccataccactctcaagttagaaaattgacagaaacaatcaccgtatgtttgaagccttatttggaaaaaaaaagaatatacttactgttggagtttcctctgtcctgacatattgataggtaggtgtttgttgtatgggtttgttgttttgcaaaaaagtgttaattgaaatgaaatagtgaaaaaggattcgttgaaatttaattaattgactgttccgtaattttgacgaaattggtcaaaaaaatgttcacttaacttctcgtaagcaggaaattttttttttggacattgtgaagttcagttgatggattgaatttcttctttaggagtgtaaagtatggagaatggtagtagcttatctgtcgagtattgatattgattatatacatcttaatttatacaaaataattttacaattaatcatttgctaccctactttaaaactgagattctgtaacaaatatgcagttttgaagtcctgtagaattttgactgctttgatctttaccttggataggttttggaatagtgtattgtaaaagtttacctgaagaagttacaacataacatgttctatcaacaataccaattttcaccagttcatttcttttacttgataatttaatacaagaaaaatctcttaatggttctactaaagaattaatagtatctggtaaatacttgtttatacctattccaaagtaatgaagatatttgccttgcttttgaatgacttttatcaaaagatttttgggccttatttgatgtattatctgctctatcaattaaatttcgaacttcctctaattcatcggttgttaatgttgaagctttagggaattcagaatgttgtgaattatcaattgaatcatcagattgtgttgatgaatacatcatatcaacatctgaatcatttgatactcctaattcagctatattattaggaattgagaaaaaatgtattgtacctttatttgatgaacatccaaggattgtattatcattattaaatgacattgattgtattcgtgcaggtaatgaacctcttctaaattctaatatctttttacttgtccttgtattaaatattctaactagagtacctttaattgatgcagttgctaaaagaacgccattattggataatgcacacactgctaatgcatttttatgacaatttataattgaaataggttgcattttaatagtatcaaatacaatcatgcttcctgtttgatgtttggatttattatcattattgttacgtgaataaactgttgatacatcactatcatcattaaactcatcattacttctagaaacatcaattcccatttctccttcttcatcatcttcaccatattcatcttcttcatctgaatatccatgtgatttactaggtatttgttgatatgctaaaactgaagaatttgaggcagataatgcacatattaagctttcatcatttgaattagtattaatattattattattattattattattattattattatcattatcttttgatttattatttgttaagatgttaatcctttgtattagtttcatacaagaaacatcataaataagtatatgagttaaaaaaaccacaattaatcttcttctattcattcttacatctaagattgaatttttataattcagctcacaaatacaagtatttttacgagtgtttatgattcttaaagtattgttaatattcaatgggccaacagttgcaactaatgatgttgcaaataacatttcagcaaatgaaattgtaccttcattaatatctgatgtgtaacaattatcaaagggatcacaattatatactgctaattcaccagttttagaagttgctaataaacatgaatgcgtttgattaaagcgtaaactacatttttgtgtcatgatatttcgttgattgtaaaattagggaaagaaattggtatataagaagagataatacacaacagaattgcaaattgcattattgataaggtcgatgccatgttaaatttacatactgtttcccaattaggaaatgttgttaagctttctacatgatatttaaacatgttcaagtaatgattatattaatagcacgtatatgctactatttgccataagtttgagatacaactggttgtattataattacataatgtacacgatataaatatagtcaaagtattgttttatgttattttttttttagattcaaattcaatttctaagtaaagtaaagtaaagtaaagtaaagatcaccattgataatatcatataagttcaatgttaataactgaattacctcttatcacacattgtcctaattgtacaaactcattctctccacgtactgatgtaacttcaaggacaattacttattgtcaaatttaggaaaaaatcgtaacctgatagtttaccctgcactactctatttccattaagttctattcttatatctttatcgagatacttcttaagttcaggaacagctaccatttgaatatgcactagatgttatacaataggaactcaaagaagaaaagactgtaacagtaaaaggtgtaaaacttctagaaaattccattactcggttaccaaataaaatttaaagacccgagattttccattttgatcccaacattgcggttttctttaaatgtcttttctgttacgtctttaaacacacaaaaagcaatggaaaacactcgtagtaaagtattctttgatatttcaattggtggtaaaactgctggtagagttgtatttgaattatttgatgatataactcctaaaactactgaaaattttaaacaattatgtttaaagacaccaggttataaagattcaatttttcatagagttattaaagattttatgattcaaggtggtgattatgaaaattttaatggtacaggtggtagttcaatttatggtgaaaaatttgatgatgaaaatttcgaattaaaacatgatgaaccatttttattatcaatggccaatgcaggtccaaatactaatggatcacaatttttcgttacaactgttaaaacaccacatttagatggtaaacatgttgtatttggtaaagttatattcaggtaaatcagttattaggaaagttgaaagaacagagacaggagaatctgatagaccattaaaggaatgtaaagtaattaattgtggtatattaaacgaaggtgatccattagtaattgatgatggaacatggtgataaatatgaagatattataagtgatgaaccaagtgttgatattaataaaccggaaactgtatttgaagcagttaataatattaaaaatattggtactgaatgttttaaacaaggtaaattagaattagcattagataaatatatcaaggcacaaagttatatggcagattataatccatatgatttaacagatgaagatgttgcaacatattggaaattacaaatttcatgttatttaaatatgtcattaatgtcattaaaattgaaaaatgcacaagatacaattaaatattctacagaagttttagaatgtgaacaattagatgataaatctaaggcaaaggcatattttagaagaggtagtggacatttaataggacataatgaagaagatgcaattgcagattttgaagaaggcacataatttacaacctaccgatgcaggtatttccaaggcattaaatgatgctaaagtttccctaaagaacagaaaggccaaggagaaggcagcatttagcaagttctttaactgattatatatatatattgtatagaaatgtgtattatagcaatagagattgaaaataacgtaatattcaatgtgacataatcggagtaaacatatccccccgccattaaattttaacttttcagtctctatattttgtataaaacccggagatggcccccaccttttcctgtgaaagtggtctcatagagcatcttctttctttctttttgattagaatatttattatacacaacaatgccttctgaaaaacactggaattacacaactgatatcgtacgtacctcaatcaatggtgtatgtcttgctaacccttttcttaaatacattgaaagtgaacgtgtcgtttataatagtaacagctcaaatgaaaaagttacaattttatctggtggtgggtcaggtcacgaacctttacatttaggatttgttggtgatggtttattagatgttgcagtatgtggtaatgtctttgcatccccttctgttaaacaaattgtctcaggtattaattctaaaccttcaaagaaaggtacaattattgttgttaagaattatactggtgatattttacattttggtttagcatctgaaagagttaaagcttcaggtttaaatgtcgaattattaattgttcaagatgatgtctcagttggtaaaactaaaaatggtatggttggtagaagaggtttagcaggtacaagtttagttcataaaattgttggtgctaaatcaattttagataatcattcagcttcatttgatgaagtttataatttaggtcaaaaagttattgataatttagttacaattggtgcttcattggatagagttacaattcctttatctaaagctaataataatgaaaatgataatgatagtgatagtgatgatgatgaaaaaattgatgaattatcaaaggatgaagttgaaattggtatgggtattcataatgaacatggtattaaaagagtttcaccaattccaactgttgaagatttagctgaatcattacttaaatatttattagacccaaatgataaagagagacattatgttaattttgattctaatgatgacgttgttttattaattaataatcttggtgcaacatctaatttagaattatatgcaattcaatcaattgttgttgaaaaattaaatttaatttataaaattaaaccagttagaatttatactggtagttttacaacttcattagatggaccaggtttttcaattactttattaaatgttaccaaagctggtggtgatgaagttttaagatgtttagatactccaacaactgcaactgcatggaattctgcaattaaaactaaagattgggaaagtttaggtaatcatattattaaagaagttccagaagttcataatattaaatcaaatattaaaattgattcatcattagttgagaaaaattttagttaaaggttgtgaagatgttttaaaagttgaaccaaaagttacattatatgatacagttgcaggtgatggagattgtggtgaaacattagcagcaggtgcaaatggtattttaaaagcattaaaggataaatcattagaattaacagatgcagttaaattttttcgatgaattaggtgatttagttgaaactgcaatgggtggtacatcaggtggattatattcaattttcatttcatcaatgggatcatatttaaagaaaattgatgatgaatctaatggtaatttccaacttaatgaaaaggaatttgctaaaactttaaatgcaggtttaaaaggtttacaaaaatatactcgtgcaaaagttggtgatagaacattaatggatacattaattccatttgttgaaacatttacaaatactaatgatctttcaaaagctgttgaagaaggtcataaaggtgcagagagtacacgtaaattagaagctaaatttggtcgtgcatcatatgttggtgaagaagaattccgtaaatttgatgcagagggtggattaccagatcctggtgcaattggtcttgatgcactcattcaaggttttgtaagtggttataatgcatgatttgttatgtttatgttttgttatttaatgagctgtatacctatatacataatagctgtaataacaactggtgatactctctgaatctttactttaactgtagacactcgaattgaaattttgctttttttcttactttatttactatggggaagtttcttttgttgtagtttctctgcctgtttataatactttctctcttaaatgacaagaaattatgaagtggtatattgattctgatcctttcttagcattacgtccatttcctgaaaatccatctaatcaattaattgaacattggcatgagattgtctttttcacaatattctttcatgtaattatgttaattgcaccaattattaattcaaaatattttggtaaattttatgatgatctgaaaaccaatgatccaatgactaaaattaattatgatattagaattgttggtattatacaatcaactatttcagcattagtttgtattccaatgtttgctcatccacaattttgggaaaatccagttagaggttcatatccatttgcaggtttaattgcttcatttataattggttattttatttgggatttaatttattgttgtattggttattatagtattttcggtatggaatatttatttcatgcagctggtgcattattcgttttcggtacaactttaataccattttgtcaaccattcctttgtgcatttttaatttttgaattaagtaccccatttgttcaattacattggatgtttacaagatctccaaaaggtatgtggagtgataaattaattacgaattaatggtattttcttaattacttcatttttcttttcaagaattatttggggtgtttatgcaactatttggagttttttcctatgttatccacagagggaatattatccaatttggttattacctgtggtttatgtcttaaattcaggtttccaattcttaaattttatgtggttttcaaaaatgattaaattggcaaagagaaccatttccgggggttcatcaaagaaagataaatagagtttataaaagattataagattatatatagataggataaactttctagatctagtttattccttcatataatgaaattgttaacttattttacttaaaacatgaaaattagacattgtaatagtgaaaattttaaattttctgcatattaattttttttcttcacaagaatgtttcttttaaagattattaatcacttttattatataccattaaacatactataaagcaatgtcaaaagttggtgtgttaacattaggacctgcagggtgcaggtaaaacaacattttgtaattctatgatgtcatatatggaatctattggacgtacagctcatttagttaatcttgatccagcagctgaaccaactgaatattcatttagtatagatatacgtgatcttatatcaattagtgatgttcaagaagaattaggattaggtccaaatggtgcattgatttattgttttgaatttttaatggaaaatttagattggcttgatgaacaaattggtgattataataatgattatttaatttttgattgtccaggacaaattgaattatatagtcatgtacctgttgtaccattattagttcaacatttacaacaacaattaggatttagattatgttgtacatatttattagaggcaccattcgttgttgatagaggtaaatttttttcaggtgctttaagtgctaatgtcaacaatgattttccttgaattaccacatataaatattttatcaaaagttgatttaattaaggattcagttggtaaacgagagcttaaaaaattctttaatccatgatccaagtttattagaagaaatgaatgatgaagatagaggtgattatgttacaggtaatgaaaaatttaggaggttaaataaagcaattgcacaattagttgatgattttggaatggttcaatttttaccattagattgtagtgataaagacaataataaaaatgttgaattgattttaagtcatattgatgatataactcaatggaatgaatcacaagaaccaaaggaaccaaaggatgaaattgaatttaatgatgatgaagatgaagattaattaatattaatattacattatctaatatacataaataaaacttatattttataaattatacaacagtttctttttttaattcgtttttaataattgtgatatcctttttattatttttctgtgtgaaaggatttagataatcgaacaatttcactaaacctggtattaattgacaatcaccaacaattattaaatcaaaatattcaacataatcaattatactttgtgatggttcatcgatattaatccaaataacataacctttatttgaatgaacaacttttgccatttctttaactaatcttctaacaccaggaattttcaatgttgtacctgtaattattaaacaatcaggtttattctttaaatcattttcagttattgaaccaattatttcaccatctggatgaaattcattataaagtacaattcttggtcttaaaataccattattttgtaatcttttacctgcaatttgtctaattaaattcatttcttcacatgatggacatgatctaattaatttattttcaccaaattttctattttcaaaatattcataatttaaatcacttatataattacatttagaacaattcattaattttatactaccatgaagttgaattgttggtggaattgattttttatccaatgatgattttgattttgatttcgatttaggtgaatctgatgttgacattaatggaattttagttttcaaatttgataattcagtatctaaacaatcaatattttgagtatataatcttaaaagtctattttgtttacttatatcattaatcatatgatgaaatggtgaaggttttgaaattgttgataaatgatataactttttcaatcattttctcaaatttttcaattgaatcattatttctgaagacattataatcaaataaatttttacctgaaccagttgattttgttgataaaccttgaaataatccattacttgatctaaaatcaggtatacctgaattaactgaaatacctgcacctgtaattacaacagtttttttagcaaatattaatgaataatgtaaaaaatataaatcttctaattcaatttgttcattaagtgaataattgaaatttatattatttaaattcaaaacagtacatggaggtggacgaaatttcaatttcggtttccttgtaaattcatatttaggtaattcatttgaaagtttgaatgtctgtaataagttatttaaagtatccagattatatttcattgcttcattagatagctttgtagatgggaaagaatcttcagttgatggtgatcttgataagcttggtgatggtgatggtgatggtgatgatgattcaattttgattatgtctaatgaattttcatcttctaatttaataactattttttcatcaattggttctttttttatcctacttgacctttccctcttaactttagttactttaccactcattatgtctttaaataaagaattataggttcataagataaagaatgtgatgtaataaatttaagattttatggtttatgggtggagttgagattttattttcagtttttgcagttttcttgtgtaattaacccaaaatggaaatgtaattgaatttcattaaaacgcgtcctaaaagggtaattttaatgtttatattttctgttgtcctggggtattgagagtgatacacagtgttttatgtatgtattggtgtgtttgtgcactctaaacgtgttgtatagctttaaaatgctgtatttaacactttgaaaaaaataagtattgtattagtatgttaaattttcaaatttttgaaaacattgttgcccttttgttcaaacaaatattagatatctacaaaatgcttctagtgttgaacacatttaatgcttttatactatactttggagacatatagtgcagaataaatacaaatactcattgtaagatccctataaaggtaataaattcatattttgaaaagatacggtcacgtgaccctattttaaaaacttaaatatttaaaaaattcagaacggatgtcccttcggggacatatggtcaaacgaaaaaatacagagaagattagcatggcccctgcataaggatgacacgctttacaaagagatcttactcaactttttttttaaatgtgtgtagtatagtatatgctatgtaagtgatatccaatgtgttaattgtacaatatacactaatacagagcagtattaaggataacatactcataacacccaacagaatcaacacaagttcgaatcttgtatagtaaaaaaatttaaataatcggcacgtgcggtattaccaatttgagtaattaaattagatcaagtaaagtattttataaaacagaggctaagtgtcaaaagatggatgaaaaatttattcaatacttttcttcttgtagtataaaccaatgacaccaattaaaggacagttccctgagagacctccaactttagctgaagctttatatcaaggtaaagaaattggtaataaacctgaaaatgctgatgaaattttaaataaattaggtatttcatcaaatgatagtagtaataataataatagtaataataataataataataataaatcaaaagaaattgttaatactgacaaaaaaataatcacgtcaaccagttattcaaaagaattcatttattgattcaccaattcctcaagaaactgaaactaaaattgatgcaaaatatattttacctgaacaatgtgaaggtgtaattaatttacaaatggattatatttttatacgtaaatccaagatgattaattatattttaagatcaagagttttcacatcattattatttggtataatttcaatgatttcatattatcaagttggtgattattttcactgattatacattcagtaaaggttattgggaaggtattaaaaaattatttatgaatagttattttactgatgatttatttaaattagtttttctgattttaatcataattgcatcatcatttacattacttcgatacattacatcatttttacaagaagaaggtaaatcagttccaaataatttaaataaatatttcccagttgatttaaaagaatatgcagctttaacaaatagttgaaaaaaattttaataaattaaataaaaatgataaagaaattgttaaaaatattaaagatttaacatattcaatagtttatagagatacaccagttgcatttttatcattaaagagagatggtaaaaatattgaaattattggttatggagttagaagagtttatattaaggcagaacttttaaaagatttactttcaatgtttttcaaagatcatgtaattaatgaaaagaaagtaggtgaaattgagaaaaattactgttaaagtttataattttgagaaagaagatattaatttattcaagagagcaggattttataaaattaaaggtgaaaatataggttttattacatcaacaattcttcggtgttacattagatacttatgaatttgatattgattctattgaattttaatttaatataaatataccgatatatctatacatattaggagctatataacagttttttttataaatttagtaaggaaagagaacatttttttaatattgagaagtaacttcattatgattttgatcaagtggaatttgatcaagataaccagattcaacacaataaactaaaccatataattgaacttcacctctttcatgatattctttaaaatatttattatttttaacacaattaattgaatttaaaacatttaattgaactaatcttttacatctctcatctatatcatcaatttttaataattcatccatatgattatttttaacaattcttaactctttcaagccattgatcaagatatgttatttctttatcagaagaaggttcttcctttgcatgatcgtgatcatgatcatgatcacgatcatgatcatgaccatgattactattatcctttaatgaagcccaaataccaccacaatcagtatgaccacaaacaataatttttttaacttttaaaacagttatagcaaattgtaaagcagacattgaagaaacatcttctttattcattacatttgcaatatttcttaaagtgaaaacttcaccaggtaaacaatcctaaagcagtacattcagagacacgactatcagaacaaccaatccaaagagtatgaggagtttgaccctttgcagataatgacataatttgaggatgagctaatttaagtgcatcaacatgagatttatttgatctaagatattcacccattgaagattgttttgttaaagtaaatggattatcttttttagaagatgaagttgaagataaataagcagcattttgtggaattgttgcaggtatatttgaaggtgatgatgatgatgatgacattttagttattgaagatagtaaattttttcttttaaatacgaaagatatgattgctagtttttaattgattgagtaattaaaagtaacatattgaaatgattcagaatgatcataatcatagtaaactcattactttcttttcaaatgtgggatcggagttgctctttatataacccaatataagcatatattaaatgaaaaaaactcaatgaatcattcagaaagaaaaaactccacttgatgtcaacgcgggccatttgacgtcacttcttgcttttacgtaatatattcaccaagcactatcaaaggcagcgaataattcattaagcttattaaagtccatttcaattatatcttcaacttgaacatcaggtaaatttggcatgtttgataatgataatgatgttgttgatgttgttgttgatggtataggtaattgacttttatcttcatctattttattaacaatatctctagatattaaacaactattacttgataaattaagtaaatctttgaaaattttatgaattctattatcattattatttattttaattccttcactaacacttgcaatcattaataatgaaatatgtggttctctataattttttaaaaatgattcaactccattacttaattcaattaattgtaaattattcattttattacctaaaatcatataataataataaatatgaatcatttgtggtggatttaatgatttaactttaatattttctttatcccattttaaatcattatttaaattattcctccaattttcaattaattttaaatcattattatatttaattatatcaattaatttaataattgcccttaatggtgaactaatatctaatataccaccaaaattaaattcttcaataccttctaaatctggtacacaatcactttcattaattaaactatcatttctttgtaacatacaaactctacccgttatatgacttataaaatgatcaatcatataacacccccaataaactcttctcctaaataatttattaatttcttcatctctatcatcaaatagagtattattattattattactttcctctctatttaatccaattgcaatacattcccttaatccacgaccaatattactccaactattctcaatattaccattatgaatatcaaataatcccaacaataataaactttgaaccattggtatattaattttaccattaatccttttataactttccatataatattctttacattctttactttcaattccatcactatataatttccctaatgcacaaactgcataaattaatgatttactacaataatctccataacctttaaaaaaatctactaaaaaagtttctcttgttaggaaaacatgtaaatcaggatacatccatttaaaaaatgttttcattgaattaattatatcttcattatctcttaaattaatccaattattattatcaatatcatctgtattaagatctctttctctctctttttctttctcatatcccataaaaataccattaccattaccataacaatatttacttacagataattttttatcctctaattctttaatcttttgctttaaatctaatacaattttacttgaaactcttaatgttctaccatcattaccaataatgcaattaacattgtgtttaatacacaagttacaatctatttgtccatccttacgaacacattttactttacgttgtctgcatcttatacatgctttcattggcatgtttccaatcctatataatctatctcttcacttttccaaccctatatattcaagtactctaatattaaaaccgttgaagattcatgtagacaatcaaagataaacaaactagaaccccaaagacgcgacgaccccgattgtttttccttttgccaaattccctttacttgtttcttgtttctttttctttttctcgcagtggcagtggcagtggcagtggcagtggcagtcgtccaattttccctctttgttgatttttgatcatttccttgatatcatctatcttacggtgttgcttatttgatctttgaatcttccttcgatctttccattttacaacagtttcattgctatatatatgtcaaatagaacacctcattctccaattcctgttcaaatgacatcaaataataatggtcacgcagctgctgcagctgctattgctgcttcaaatactgcttcaaataattatatgagtaatactaatatatcaaatattcctcaatattcaaataataatcttaatttaaataataatagtagtaatataaataattcaaatacaaatcatcaatatcatagtcaatcatcatctcaacaacaaaatcaaccttcaaattcttcaaatcaagttgttggtttacattataaaattggtagtaaaattggtgaaggttcatttggtgttatatttgaaggtacaaatttaattaatggtatacctgttgcaattaaattcgaacctcgtaaaactgatgctcctcaattaaaggatgaatataaaacttataaattattaaatggtgttgaaagtattccaaatgcttattatttcggtcaagaaggtttacataatattttagtaattgatttattaggtccttcattagaagatttatttgattggtgtggaaggaaatttagtgttaaaactgttgttcaaattgctgttcaaatgattacattaattcaaaaagttcatgaaaatgatttgatttatagagatattaaacctgataatttcttaattggtagacaaggtttacctgatgaaaattcaattcatttagttgattttggtatggctaaatattatagagatccaaaaactaaacatcatataccttatagagaaaaaaaatctttatcaggtactgcaagatatatgtcagttaatactcatttaggtagagaacaatcaagaagagatgatttagaagctttaggtcatgtattcttttatttccttaaaggtcaattaccttggcaaggtttaaaagctccaactaataaacaaaaatatgaaaaaattggtgaaaagaagagaacaactccaattaatgaattatgtaatggtttaccaattcaatttggtagatatttagaaaatgttagaaatttacaatttgatgcagaacctgattatgataaatatcgtcaattattattaagtgttttacctgatataggtgaaactgctgatggtcattatgattggatggatctgaataatggtaaaggttgggatttatcaattaataaaaaaccaaatttacatggttatggtcatccaaatccacctggtgaaaaacgtcaacatcaaaaacgtagtaaacaacaacaacacaatagtaataataataataatatgaataataataatatgaataataatatgaataataataaccttaataataataacctcaataataccaataataatataccacaagttaatcaacaaatttcaaattctcaacctcaacaattacaacaatcaaatggtgtttcaaatattgcaggtcaaagtggaatccctcaataccgttctaatttagatttaattaataataacaataataataataatattaacaataatattaataataatatcagtgattcacaatttaataaagaatcttcaaatgttaaaccattacctaatttaccatcacattcttattcaaagcaaaatcatgataatgttcatgatcaagcaaagaataaaaatgatgatgatgaaaatgatcaaggttgttttgctaaattaatgtgttgttagaaaaaaaatctattttattattatcctatttattactatatactatttatactatatacttactcctctcattaatctctttcttctcgtattaccatctctttgattcatcaccttcatcccatttattttcaacataacctaataattttttaacattatcaattgttaattgatcacccatgtttttaccccaattatcactaattttaattgcattaccaccaccacaagattttaatttaattacaatattcattggacttgaatcaaaatcatttgtaaatgatgtaccaataccaaaactacatccaatattaatattatcacaaaattcctttaatttaatacatttatcaacatttaatgaatcactaaagcaaataattttattatttatattaatttcattataccaatttttaatcattttagcatattcatatggatctccactatcttgtctaacaccaatataccaatttgcaaaaggtttaaaaatttttaaaaatgattttgtaccataagtatcagttaatgctaatccaacattttccttaccaacagtatcagcatattgttcaattgataatttatttgccattaaataaccattataaccattattttgtttagttgataaaattgctccaactcccatcatccattcatgaccaattgtaccaattggattaaaaccatattttttagcaaaataaacatttgaagtacctaagactaaatcattatgtggcatacctttaataacattctcttgaacttggaaactacgacgacgtctcgtaccaaattcactaaatttacaattattctcaataagttttaaacatttagaatttgataattttgtaattaattcatcctgttgatggttgattattaattgtccaattagtatctataaatttaaaataacattcacttacaagtgcaagtactggaatttcatataatgttacaatttcccatttaccatgaactgaaattgtaatatcatataatatgtcatcttcatcattattattatcttctgggattaaattgattgtaatttcatcatttggtgttaatttaacagttttcaaccaatttaaatgatcttgagtgaaatacggtagcttttcatgcaagtaatttatttcatcatctgtgaaacgtaaattggataaattattaatttctttaattaaccaatctattgcaattttagtgaacttttttttcaggtgttctatttgtaagtgtaaattcacaatcaatatttgaataatgtttatgaattgcagcttgcattgttaacttatacaagtcagtgtctaatagtgatacaatcattgatggttttagttgtttgttcgttattttgataagaaaagagtcatgtatagagtattaataatagaagtagactttatattcattgatcgcgttttaatgttgtcttggttacttattatcaacaactctttctttctttaactaggacatggacgaactgtttgatgtggctacatttgcattgagtgaagaggatataactttactcaatgacaaggtgaaggagttaaagagttcgcttgatgatgagtattatattgaagaagaagatggagaggaagaggaagatgatgaaaaagtacacgatgtaccgccaatacatcaagaggaagaatctcaagaagaggatttatcacattttgtttatgatccaccaactagttataagaatatcgtattactgtatacaattccaatactactaatcgtttcattatacacatggattcatttcaatactcctgatacattattgattaatgaacttcaaaatcaaattgaaacactttcttcaaaagtggctcagctggaacatattcaacaaaatattgttaaagaaacaacaactgttgtagtttcttctgaagttaggtctgatactaagtcagatattaagtcagactattaagtcagatataacttctgaaatagaaataacgacatcatcattatcaccaccaccaccaccacaggttgttcacacatatacaaatattgcacgtcaatgtcgtgtttcacgtcaattaacatcatatcctgtacgtaaatatcgtccacaacataggaaaagtacaatttcacgtatattacatggattcccagatactttacgtagattttattatactggtacatttttaaagacaccatttattgaaccaattgataacattgatttattttcaccaaataatagtcctagtaacgttttacatgatacaggattttggcaatgttataatgatggtaatatttattttacaattgataccccaccaataattatatctgagattggtatttattatggtattagaaatgataatgataataatgataatgataatgaacgttggaataaagcaatggttcagagatattgaaattttaattaaacccgttaattcaacaattctttcaattccaaaggttcaaaacattggaccaatcaataacaaacaacgcaatgatccattattacaatcatggatatcacttggttcatttgaataccaaccaagtgacgatatgatgtatcaatcattccactttgataaggatatctcggcggtggtcggtgcgacggcggtggaaggtgttatgttagtcattaagagtaattggggtgatgcttacaccgttttagatactttacgtatctatactgtagtttagttagtgtatagtaagtatacatatatatattattatataatggatcaatctgatgtttatagggcttttgaatcatttgattttgataaatgtgcaaattatggtccaacacttacagctgtaagggaacaacatgcacaacaattagatgaacgtggagagaaaccaacacctgaagatgatgaacaattaattttacaaactaaggcatatatattttgtacggagactgataatatacttgaattatcagattatgcacaatggaaattacaggaggaagaaagtaaagtaacaaattcatatgaagaagttgttgaaatgatattacaaaacaagccagttcctggtattcaacaaattccaacaacgttacatgatgaatctgaggcatcagagactaaattgtcagcaaggccaaaaccttgggaatcaaaggataattgattgattgatttatacttgattttgattgattttaatcttaattttttatactttttataaaactatgttatgtagttaatatatgatatgatacacttagtaacgttcttcatcgacaatttccttcttttcaagaggattatatttaaggaatttttcaataaggtcaacatgagttaaaaccattcttctacaacaataacgatttaattttaatctatcgagtgcatcaccttcactcatatgatcatcctctaaataactaagataagtttcccacttgtcaccaacaaccttaccacatgagaagcatcgtactggaataatcattcttgttcttgttaaagaagagtatattaaagatacaaatacacctttctcactgtatgagagtaatataactatacactgcatattaaaaaaatttttcaccatgaattttttttttctatttctatttctatttctatttggatttctaatggtttacttgattgaatctgtgtttatctctacaggatcttctctatatatcatactggaatgtcatcattaactgcaggaactgtacgtccgcatttatcactcgtttcagaggatgcttctcatgttttagctgttcaaggtcatcatattgcagttttctcagttatatcaggtagaccaattcgtcatttatcacttgatgcaattaatatcccttcaatagttgatattatttcttctcctgctgtcccttctcttgcatatattcttactattgattctcttcatattattaattggcttgaaaatgtttcaaatccaataatcgcttcatttaaacttaatgattcatatacttataaaagatttattaaatttcattcaaattcttcaacaaaggtatatttattagcatcatcaataaataatgaacaacaacaatctaattttaatattctctcatatgatttagaatcaaatactatattagaaactatttcatcatttactaatatttcatcattttcaatttcaactaatggtattatttttgtttcaaagagaccaaattcttcttcattaattacaattaactatattccattagattcctttgaatcatatacttttacacattcattacttcattctaaggctaatattactacttgtgcagtttcaaataattcagatgatccaataatagcattagcttattcaactggtttaattgtaacattatttgatattttttcatcatcaattaattcaattcaacctccaactaaatcacttaaatggcatatggatccagtaactgcattatcctttaatcatgattcaacttaccttttctctggtggttcagaaaaagtacttgttttatggaatataattaatgataaacaatcttatttaccaagattaaatggcacaattcaacatatttcaataaattctaataatgttaatttaattaatttaggtttatctgttattgataatgatatggaatatttattattaaattcagttgatttattatcaaaattacaaattacttcaccacattttttctcaggtttaaatgataataataatttaattaaaaaatcatttcaaaaagatataaattcttgtaattaaaaatttaaagggtaaatataaatataaatttaattttaaaatcagattataaattcaatccaatttctaaaaatctttacctttcagctggtagatttttacaaatttatgatccaattcatgatttacaattatctaatattgcagttattccaccatctcaacaatatggtaaagttggtaatgaacataatttatcagatcctttattagttggatttgattttatatcaagttcaaaatcagatattaattggttagttacatgtgatgtacaaattaatggtgaaaaaaatctatcatcagttgttcaatcattaaaattttggaaatttaattcatcaactaataaatcaacttcatcaattgataattatacattaaattatcatattgttgatccaatgatttctaaaatttcatgtattttacctgcacctgaatcatatttcaagggtgaagcattaattacagcagatattttaggtaatgttaaattatggagaccaaataattcaggtgtttggactttacgtaaatattataaatcaggtattgaaaatgatgtgaaaaaaattgatgataatgtaaataattataatattgaaaatttaaataataataattcaactaaatgtgcttggtctccagataatagtattattgcagttgctagaaatggtaaaattatatttttagatattaacacatttacaccaattgaatttgttaaacctgcaatttcatcatcaaaatttcataaacatgcaaaaattattaatgatgataataatgattcaatttcagataattcaattagatatttagatattaatttacaaaataatcaaattatttgattgatttttcatcaaatggtaaattactctatattcaaacaagaacaaatttcataattttccatatacttaaaaataaaattttacttggtttaacatttaataattcatcattaacattaggattttcacatgcatttactaaattaattaaaaatagcaataataataacaatattgatgataatacagatactttattaatagtttgtaaatatttcaataaggaaacatccaatatttcaagtaaaataactacatgggatataacatcacaatcatcaatcaaacgtacaacaaatatcacatatgatggattaataattggagctgaatgggattttacatctaagggatggttatttgcagatattgaattcaaatttcgttcatttagataaattatcatcatcatcatcaactaaatcaacattagatgaaaaacttgaattacaacaaactacaaatacttcgatttccaccaatgcaggattattagcctaatgcaagattacacaagagtaaacctaaacctactgctatcctcatagatgatgagaagtcaaccttatacaatggtatatttgatacactcattgaccgtctcgacggggtctctatggagacattgtttgataatgttcttcaccttgtataaatgaaatcgcgatgtgtaattattaaccctagtaatagctatactctttatcttactgtgtatcttcaattagcatagagtcaatatgtttggtaataaatcatttatgggtaagagagaacgtttagcttatgaacaatcatttgttggtaaatatcaaaaattagtacgaaaaaattcgtttttattctttggattaccaatgatgttatcaattgcattaggttcagtacttttaacaaattttacatcattaagatatgaacgtagagatgaaaaagttcaagaaatgtcagaggatgaagcattaaatatgattaatagtcgtaggaaagttgatataaaggatgaatattataaattacaaggtttactggatgaacatgaagattggcaacctaaaagagttgaaagattacctggtgaaagtgataataaatggtaagaatgggttttgatcttcttcaattgtatatagaaaaaatataatataacaaatatgtgtaactaattaatgaatcagttttatgaataatagatcttgctatagtaaaaaaaattttttttttcactatagaataaattattttaaccttatcttttaagacaaggatggtttcattttcctgtgaagtgtgtaatgatacagttgtaaagagaaaactacaacaacatcaaagatcatgtcgtggttcatattttacttgtattgattgttcaactactttttatggtaatgatcatcaatctcatacaagttgtatcagtgaagctgaaaaatatgaaaaagcattgtacaagggtaagaaaggtaaacaacaacaacaacaacaacagcaaaataaagttaccaaacctgtaaaggaaacaccaatcaagaaagttgaacctgtaaagaaattgaaacagttaaagaagctaaacccgttgaaaaaactaaagaatctagtaaatcattagattttggtaaatttatcaataaaccaacaactctttacaaacttttcaaagaatcaaagaaagaaactaaacttaatgataaatcagaattcttgaaaaatgttaaaatatccaaaaatgatgatggttcattctcattaactctatagatagtatacatgtacaattattgtgcttctttataatagacaaacaaaaagaaactcatttcaatgcaatcattatcttttcgtaaaataatttagcagtatgtgatggaaatgataattcttcacacaaataaccaggtaaatgttctttaattttttcattcccatcccatattggacgataaattatatcaattgattcaagttgatctaaatttgttggaattgttaatttataataatgttcacctttattaccacgttgtttaattgtaaagattataaatttttcaccttcatacatttcacaacattttaaacctgttaaaaattcaattaaattaaattttgcatcattttcaactttattatcttcaaaaatcccattattttttaaatcatttaattgatttaaaatttcaccttctctttcatttgctgaatcaacaatacttttccatctctcaatttcatcatctttttgccttattattttcttaacttcaattgtatttgcagttaatttagtctttaaatcaacaattctattcttcaatttttcattctcttgaattaatttattaataactttttccctcttcttttccttttcttcaacacttgatttatatttatcataaacatctggtaattttgtattaacttgttttaaaagtgacgttaaattcttataatctgctctttcaaacattcgtccaacttcactcatacttggaaattccttgctttgactccttaattgatcatcaatttgattatcactaaattcttcatcgtcactagatccactatgattatcatttgaatctaataaactattaacttttaatcttttatcgattatattattatcattcccatcattctccttatcaacagctccattgccccttttaagtgctaccatctttactcaattaagagatcaacatgtaaatatatcaaccaagaacagacctttataaacaatgcaaatcaagaaaattcaaataatgcgcagcctgtgcagtggctggtgaaatcgtttggtttctatagggatttctaatggtagcttgtttcatttggatggtcaagtagtgcatattgtgtattgtttgaggggtaaacgtgtaatgacataccttcttatagtagagagcatgtttttaaaagatgtatgtatgaatatatgcaaagaattgtaaaatatacgtacgcaagaacgtgaattcaatctaaaactgctacccaatatgttacttttcaaaagatgttctgatatctacatcttttttaaatcatataatatatttaccaaaacagtatagtattcaattactttttaagtaatatattcaattaaataaataaataaaaatctattcataaatctatttaaaaaaacattttatacatagcaaaatctctaaactactcatcacctctccaccaagcatcagttatatcaccaccctgtgctttaatattaagtataaatcccatagaagcactaatagctgctgcaattgacatttcttttggtacattagaagtataatttggatcatctctatgcattatatctctataaatttcatataaaactttcatccaaaataatgtaagtccaataacaaagaatatcaatggtggtgtttgataaaaagtataataaagcaatgctaaattataaattaatggaatttcaagtataatataatgccataaacttctaatcaaatcaaatggagtacctaaaataaaatcaattgctttgtaaagtaaagtagttttcattatcatcacttgaacttgtacgtaattcatctaataaccaatcacgatatctatcaacattatgaaatggaggttccattgattgtgaaataatattaagagcttcagttacttgtctatcacgtaaatctctttcattagttgttacaaatctaatattagttggacctacaacacttggacttaaaacatcctgccattactgcttgagtatgtaacattgatgattgattaagaagaggtgaagttcttggcatgttacgtatatgtgcatttggtggtattcttgtgctattaatttggttactattattattattatcattatgatgatgatggttttcttgctcattttcatttacagtttcaactacaggtgtatgatgatgattatcattattataattatcattaccataattgtgatgatgactctcctcatgattttgtaaacctctaactatgttcatgcatatcaattgacattattggatcaaatattgaaggtttctttttacttgcacgttgattatttgcaaattcaattacattatctcttatctttgttttattatcaataaataaatcaactatatttgaagttgtctctgtactatatagcaaagatttcaatctatttacagtaccattaataaaagcattattaagaataggttgagaacgtgtaggtgtattgttttctcttaatatacgtggattgagtgtactgttattaatggtattcccaatattattactattatcattaacaattgtaccttctaattgtcttatacgagccaaattaaagggatcagctacggtattagccctaacagagaccggttctgacaataccgaagttggagtccttgctacatgaggcaatgaggcactatttctacgtccttcactcatcaactgagtatatactatactaatgaatcctttactagaatgatgtctactaaacggcagtaaacaaaacaggtagacaaactcttcctttccatttcccttaataattttgagaatttgcaggcgttgattttttttgagtcttgcgttgctctaataatttgacttacactttaatgacgagtttgaacttatttatttatttatagaaaggtaccttttttttaggatagaccatactacatcagtatctacattgcaacaatggctatgagattacatacgaagaatttggcaaaacgtttgcttaaatacatagtgatcattgcattcatatcttttgtttacgtgttttggccatatcaacaaattgaaaaattatcagattctttaacattagatgaaaaaaacgattatcttgattcaattttgaatcctccaaagaatgaaatttatgatggtaattctgatcctttaaaggcagattttaatccaaataatgataaatttgatttctcaagtaaaatagatattgaaaaaatgaatagagctttaaataaaatgaaaatgaaacctttaactaatgataaaggtagtactattggtaaagaatcagattctgattttgaaagtcaagtaattgaaaaagttaatgttatacctgatattttatcaaagcaaacttttttaacaagtgatccattatcaggatttttaggttcttttgatataaataaaaatattgaaccttcatgtggtaaaattttatataaaccaacagatgatgaaaaattaattaattattcagaaaaggaattattacttgaagatgatctaattgaaatgcgtaaatggttacttaattcaaaatttgctgaaattgttaaaactgttgatccacattcagctgatggtacttcattatctgatatttctcattggtttaaaagttttagttcaagtgtttggttacctgaggaacaattacatatggttgcatcaactattgtttatgcaccaaatgatgaaaatgttccattagtttcatttttaagattacaactgtttaataatgaatggaaagaaattaaaggtcgtagaattagatattctggtttaactgataaagatattgattctgctttacgtgaatatgctaaatcaaatgaagaaagacatttagagcgtatttcattaagattcccatcaattttaaatattccaattttaggtgatgttaaaccaaagcaaggtaaaactattggtccaacaaaaccttatcttatttataaagatggtgagtatcgttcagaacctgttattgtatttgatatggataataatggagtttctaaaaaatatattgttttaccattaaataaacctgtcggttcagatcttgaacatccacctttaagattcaaaggtttaacaactttagaaaatgatgcatgggtaccattttttgatagtgtacgtattggagattcaaagacatcacaaggtgatattcattttattaattataatttattatcagttttcaaatgttcgttagattctggtagatgtagtaaaattcaacaacaaaatccaacaaagaaagatcaatcaataaatttaataaagggtggttcatcacttttcccattaccacgtcaaattgtccaatcattaactgatggtgaaaaaaatcatagattacaaatttgggcaggtataccaacaattgaaacttcaaatggtttacaatcaattttaatggtattaattaaagatgatggtgttttccgtattgaattactttcaagtccattagagattaatgattttataagtgatatttcatattgggatattgcatcttcaggtggtggtaataattttaatgatcatatgttagtaacaaaaattactgaagacggtcgtgtgaatattgttacattacaaaatattgttaattatattcttggagctattgcacctgatggtaaattacctgcacaaacttataatcaagaattatcatatgatcgtacaagattagttttccaatgtgcaaatgaaatatcaaaatcaagtagttcttttaagaatgatgatgatgttaataattttaaagacaagactactgaagagtggtgatttataggtttgtataataataatataatatactataataatcaattcattaacttacagtaatggacgtatcacggtgaagataataaccattaccaatctcaaagagtctattctccggtacaggcgctccctccaaatgaaaaatttcaatttccctcacacaatttttcacttcaaaaaaaattccattattaaggtattgttcgtaatgactattaacttgaatggatttattgattgatttattgattgatttccatttatatatacattgtttctctttgaatttctctctttcagacaagtaaaaatgctcagacaagctagatcattctcatcatctgcatctcgtgcaactaaatataacaaatattcctcaattcttactgaaccaaaatccaatggtgcatcacaagctatgctttatgcaactggttttaaggaaaatgatttcgttaagggtcaagttggtgttggttcatgttggtggagtggtaatccatgtaacatgcatttaatggatcttaataaagcatgtactgattctgttgaaaaggcaggtcttaaaggtatgcaatttaatacaattggtatctctgatggtatctcaatgggtactacaggtatgagatattctttacaatctcgtgaaattattgctgattcttttgaaactattgttttaggtcaacattatgatgctaatattggtattccaggttgtgataaaaatatgccaggtgttcttatggcttttgcaagacataatagaccttcaattatggtttatggtggtagtattttaccaggttcaggttcatgttctggtgttccaaaaactttagatgttgttagtgctttccaatcttatggtcaatatttatctcatgaaattgatgaaactcaaagatctgatattattaaacatgcttgtccaggtcctggtgcttgtggtggtatgtataccgctaatactttagcttctgctgcggaagttcttggtatgtctcttccatactcctcatcatctccagccgtttctcaagcaaagaaggatgaatgtgctaatgttggtttcgcaatcaaaaacttaattgaaaaggatattagaccaagtgatatcttaactaaatctgcatttgaaaatgccattagatatacaattgctgttggtggttcaactaatgctgtcttacatcttattgcaattgctcataccgctaatattaaattaacaattgatgatttccaaagaatctcagatgatactccattattaggtgatttcaaaccttctggtaagtacgttatggctgatcttccaaaagttggtggtactccagcagttatgaaattcttacttgcaaatggtatgcttgatggttcaactttaactgttactggtagaacaatgaaacaaaacttagatgatcttccaggtttaccagaaaaacaagacattattagagcagtctctaatccaattaaaccaactggtcatttacaaatcttaaaaggttctcttgcacctgaaggttcagttgctaaaattactggtaaagaaggtaccagatttgaaggtaaggctaaatgttatgacgaagaagcagatttcattaaagctcttgaaaatggtgaaattaaaaagggtgaaaaaactgttgtcgttattagatatcaaggtccaaagggtggtccaggtatgccagaaatgttaaaaccatcatctgctttaatgggttatggtcttggtaaagattgtgcattattaactgatggtagattctccggtggttctcatggtttcttaattggtcatattgttccagaagcttatgaaggtggtccaattggtttagttaaagatggcgatgaaattatcattgatgcagataacaatatcattgatgttcttgtttctgaagaagaattagctgaaagacgtaagtcttggaaaaaaccagaattaaaatacaagagaggtactttatacaaatatgctaaacttgtctctgacgcttcaaaaggttgtgttcttgattatgatggaaatgataaataaatgtattatgaaaatacatattaaatcatctgttcattgaatgaataacctatttacattattattctcgctcttctatatagtatatcgacaattgatagtcctggaatggatcttcaatttacatcaaaaatctaaaaaaaattggtaaaaattaaattctttattatttgatcgtataattaaatgtacatgtaaaattcatattagattgtttgagcttcagtttctaatcctaatgaaactataccattccaaacagatccaaaaccataacaaactgctccacctccaactatccaaacgttattatctgtttctattgtactggatccgacaaagactggacttgtagcccaacattcatcatcaatagtaatagagctgatagttttggtcggtatattgatttcaatagcagtgtcaaattgatcatatagtttcatacctacaccaccaataatgataatattgccatttttggtgaatgatttgaatccatatcttgccagtactggatgtaccattataactgttagtaaaacttttttattatctaaatcaacagtgatttcgtataatttgtcattaaaagtgaaactaccgctgtcaaaaatcttaccaccaatcaagtagtatttaccatcgagttcaataatttctgaaccctctagaagaacgttctcatcactaaactgtaattgatatgacaatccatttggtgaataaatttgaaatccttcaccatttgagccaccgtaaattaaaatatcatctccaaatttgacacatgaatgtttaacaagaccggaatccaacgatttttgaacattccattcataaccattactattttcacttaacttccaaacctcatcaataccaattccaggaatacgacgtccaccaattaaatatacagcgttgttcattttgacagattttgcagaaacacgtcctttgaattcctttggtgtagttatttgaatatctttatttaatccatgcgtgtctgataatcttgattggttactaccacaagtgatcagtctatcgtttttgatactaaaacaattatgaaattttctttcaagttcagttggaagttcagttttttcagttttccaattatatccaaatttggaaactggaagaggtttatatagttcagcatatgaagtggagtaaacttcaacaccttcttgattagtggcgtgcaagttaatgtaatgttgtccaaaaaagataaattcttcccattcatcaaatgcttcaacttcatgaactttcttcttaatttcattgggaactaaatcccaacaaccaatcaagtttctagcattaacattttgaaatccaagttttttaaatctattgatttgatcaagtatagttggatatgtatgcacacattgtaaaggtgcttccattttcttgaaatgattaatcattcttttggcaaatggatgatgtccaccagatggcataagttgttcaagaattaagaaatgtgagtttgaaaattcagaagaagtgttaataattgggtttgcagtttcgggtgtcatgtatgctaatgaaacttcagcaatgaaaatatttgttgttgctgaactatttgctgtgaatgactcaagttgttgacagtataattctttatttgttaaatcacaacccattgtagcgtaattttcagttttaataataacaccaggaataccatgattttgaatattttcaccaataagctctttcaactcaggtgccatatttatcatttgtgatttatacccaatcaattctgggaaatcaacatcaatacagtataattttctatctttaaatttttgatcatctaataattgaaatggtaatggatcatacccacatcctagatttattatattgattctttgacctattggttgtgcttcaattatcttttcaatcgccattctgatagatttcatacgaatccaatacccacgattgataacaggtgaacgacgtggtgattttttcacaaaatgttgaaaatatggtttactttcaggttcaactatagggttgtatattatttccactgatctcttagaaacgatagatgaatcattggtaccttgaacaaataaatcatgaacaatcttttttgtctttttatcattttttgaaacttttacattatctcctttttctccctttgctaaaacattttgctttttaccgtgttttccaaactgcttttgagtaacagaggcaaacacatcaatccagttatccatattttactaacttttgctgaacagaaagcagtagagaattgttaaagttgttgaaaaaaatattttttttcaaattatcatgttgatccaaagtgacgtcaaattgcacagcctttaggagcagcaaatctttaatttgttgctgattactgattgctactacaaccaattgatattgacaactatacgattaagagataatcattatatgttctaatgccagtaacaagaagcgaaactccaattagtataattgatgactcatttattgatagtcagacggaatctaatgctcaatcacaaatcaatgaaaatgcaaacataataatacccaaacctaggaaatttgtgttgacaaagtacacgatatattccacaacccaaagaatgtatattgttggaagtaatactagagagacagttttccgtatacttgaaattgattttaccaatagtgaaaaattaacaattatggaagacaatgtgttttttagcagacatgagattatggaagttttgaatggtatagaaaattcaagtgacgaaggattaactaaaagacaaacggtggtgggattattaggatttattaaatttaccaaaggatattatttgatagtagttttgaaacgaagagaggttgcagttttgggatcacatgaaatttatcatattgatcaaactgatttaattccagttgagaataattataaagaacctgaaaaaaattctccagaagagaggatatatacagacatttaagaatatcaatttaaacacaacattttattttagttatagttatgatttaactaactcgctacagacaaatatgatacgaaataaacgacaatcattaaatatgaatggtaatacagaattatcatacgtatttcagtttaatgaacgatttatgtggaacgttgcattgttaaaaccagctttccaaacttttgataaagtctatgattggtttcaaccaataatacacgggtttgttgatcaagttaagaattcagttttccaaaaacatttttacattacaattattgcaagaagatcacatcattttgcaggggcaagatttttcaaacgtggtgctaatgataatggtgatgttgctaatgaagttgaaactgaacaaattgtttcggatatgttaacatcgtcattccatgatccaggtgctggattctataataatccaagatatacttcatttgttcaacacagaggatcaattccattatcatggtcacaggaaacatcaccaaatctacgtatgactaaaccgcctattgaactttcagttattgacccatatttttccaaagcggcagcacatttcaatgatcttttcaaaagatatgggcaacctattcagatattaaacttaattaaacaaagagagaaaactccaagagagatgaaattacttgatgcattcaatgaatgtgttgattatcttaatttgtttttacctgaggataaaaaactagattatacagcatgggatatgtcaagagctgcaaaatcacgtagtcaagatgttattagttggcttgagaaatattctgagaattcattatcgaagacggggattttttcataatggtaaatctgtctatgatacgaagttacaacaaggaatttgtagaacaaattgtgtggattgtttagatagaacgaacacagcacaatttgttattggtaaaagagcattaggttatcaattacacgcattaggtataatacgtggtaaatatttagaatatgatagtgatgttacaaacgttttaactgaaatgtttcatgatcatggtgatacaatcgcattacaatatggtggatcacatttagttaatacattacaaacatataggaaaattaatcaatggacatcacattcaagagacatgattgaatcagttaaaagattttatagtaattcatttatggatgcacagagacaagatgcaattaatttattcttgggtaattatgtctattcaccaggtaaggcacaattatgggatatgaacagtgatcattatttacacaatactaaaaaatactttgacttaaatggaacaccatcctatagacattggtttactgatgcatacttaattgattataagaaagatttagtaaaacaatgggaggaaactttaaataacaaatttttagttgatttacaagaagagagggttatacattatgaaaattgaaccatatgctggatgttttgaaaattattggaatattaaatatggatcaagattactagtttcattttctaatttatttgaatttcaaatgaattcaactagacaatattctaataatgttgaatctgttaaactatacccatcaacgtctaatacaaaaaccagtaaaaaaacatcaggatttggattattcacattatttaaaaaacaagatagttctactaatgaagtttctgatactagttcaacatatagtaaaactgcaagtaaaagatttaatagttttagtgaaagattacgtggtaatgcacccaaacatatatttgatcccgaatatgaggaaggtacatatttttcaccatttaaatcaagaaaaccacatagagaattaaaattattgtatggcaagacagagaatgaagatgttataattgatgatgaaattgaagatttaaggaatgatttagaaaaacatttgagtggattatttcaaatagatttagatgatctagataaggaagagtataaatcatatcaaaggcaatataaatcatttcttatcattctttcacaattacaggaatctaaagactttaacaaattttatgatgaattcaaagttacagagaaatatttgaatgattcaggattacccatcattgatagtaatataactaatgaagttttcattaaagattttgaagcacattataataatcaaaataataagaagcccattgaagaaattgaagaaaagaatgaagatactgcgtttatccaggatgacgagtttgaaatgtataaaagtgataatgatgatatagaatattcagaaaaaagtaactcttttgagaacgatgatgtggatgaaagttcacacgacgatacactttcattgattgaactagataattcaaaatcaactaaaaattcattagaacaaatagctaaagaacataatattgcaatacctgaacttgattcagtaacacttgaatttttatcaatcatcagtctcgtggacgaaagaaataccagtttacggaatgtcagaattctgtaagaatgataataatttgaataatatcggttatgatgatgatgaaactctatcaagtattgaatcaccatcaccaattggaatggattattataatgaggactatagtttcaatacatttcaagataacaaacaaaattatacaattgttcatcatagggatgaagatgtagttgataaattagttaaagaatatacaaaattatctaaatcatatattgatagggatgatattggtaaatatcagaaacattatactttaatcaatgagatgaaagaatttgataccgataagattaaacttgaagtacctgatatacaaattaatggtaagccgaataaagaacttagtaaagaaatagatgatatacctgaagaaactacatcaatgttaaatgtaactagtggtgattctgagaattattttagttttaaaatgttgaatagaaagtcatccaaacaggtattgcaaaatgataaaaagtaattagtattttttttctttctataattttttaaattgtttaactaatttatcgaaattttcatttatttcagattgtttccaattttcactctctgatataacataaacgcaaaacattgttgattttgaatcatcagattttatccatattttaccattaacaccaattgcaatttcaaattttatcttttcaactaattttgataatattaaagcatttggtgagaataataaaaatcttgaataagcagttgaaacattaaaacaataaccaccatttaatacaccaaaaccaccatctttaccagtaactgcatctatacaacttaattcatcttcaatatttttttcagcaattgaaactctagcatatattaaatctcttatttgtaatcttggtctatttttctttgaagcatttggaaaagcaaaaatatttaataaaactacacaacttgattcatttaatgaaactttataatattcaccaaattgtccaataattgtaccaattactagatcaccaacttgaggtatataccttccatgagctgaatctatatagaaaagagaagaatttttattagttttctgatttatgaaaatacctgaacttgaaggtaataaagttgattgatcatttgataaaagtatatttggacctaatgttatatctgaattttcaataggttcatttatagtaattgtatcacccggtataacaagattaagggtattagacattgttatgtgtgtgtttgctgttcattctacaagataaatcaaatcgtaataaaatattcatgatatactattgaaatttttttcccacagtaaaaataaaatttcaaaaccaacaggtcacgtgcagaggtgaaattttcataaattattatgtaatatactgcaatggtttactgagccttcctattatgataattatcagtagttatagttatagttattataccaatacttcttttaacaatgttatcactgtataagtctattgtaatgggtatagttgttatactattgttatagtattcaattagacatgtaaacattattgaataaatacaagacatcttatatgtaccgggatagagataccctttgtagtaatatgatccgatttctacaccctgtcttatgagattactaatactaataatgcttgaatttgataaaacggttaacatgttaattggttagtataaaaaccgttattacagggtattatattatatattaatatcgttataatcttaccactttaattcatttagagatatatctcttataaagaaagttaaatatacacaactgtggataccaatttgcagtagataaaaaattattagtaaggaaattttgaattttctctcgtattgaataaataaagtttagttgccttatttttccgtgagagctgcgatttttccatttttatcgattggtttagtttgattaatatatctccgttttatttccatttttcttctctattttaaatcacaggttattgcttcaacaatcagggctggattagattatgggtttactatcattaggtactccattacattggaatcaaagtaaaaaacatgcagagcatgtaagaaataatggtatttctcaattattgattagtcatgaaatttctaaaaatcgtgataatgataaattttattggggtgatgaaattgaatatataatggttaatataagtgatgaaaataatgatgaaaaatctttaaaattatcaattgatcatgattatgtattggataatttatctgaagatggtaaaaattatcaaaaatctttagataatgaagtcctgtttcatcctgaatatggacgtttcatgcttgaagcaactcctttaaatccttatgatggtacatccatttctgattattttaaagttgaagataatatgcatagaagacgtaaattagcaattgaagaaattgaaaatccaaatgtttaccctttaactttaacaacttatcctttaatgggtgtaaacgatttttgttcaccttcaactgaagttaatggttctgcttcaaaatctttattcttaccagatgaaattattaataaacatgttagatttcctactttaactgctaatattcgtcgtcgtcgtggtcaaaaagttgcaatcaatatccccctatttaaagatataaatactcgttcaatggatgcaattgatgaatcaattccagttcgtgatttatttccttattctgataatgaaccatttttaaattctaaaaatccagctgcaaaacctggtcatatttatatggattcaatggggtttggaatgggttcttcttgtttacaagttacaatgcaagctaaaaatatgaatgaagcacgttatttatttgattctttaattaatattgctccttttatgttagcaataactgctgctgcacctgtttttagaggtcatttagctgatcaagatgttagatggaatgttatatcaggtgctgtcgatgatagaactccatttgaaagaaatgaggaaccattattaaatcaccccctatatggtggtcatgaaaataatagtgaaaatgttaaggtaaatatgaaaagaattccaaaatcaagatatgaatcaataagtcaatatttaggtggtaatgaatttttcaaatcaagttataatgatttaaatgctccaataaatgaagaagttttcaatagattaaaatcaaatggatttgatgatgaattatcaaaacattttgcatcatttattcatacgtgatccattagttttatttagtgaaagaattgaacaagataataatgaatcaatggatcattttgaaaatattcaatcaactaattggcaaacattaagatttaaagttccatcacaagattcaaaacctaattcaaataaacctggttggagagttgaattaagaccaatggaaatttctttaacagattttgaaaatgctgcttattcagttttctcaattttattaagtcgtgcaattttacattttagattaaataattatgtgaatatttcattagttgatgaaaatatgattcgagcccatcatagagatgcaattaataaagatttattttatattagaacaaatataaatgataataatgatgaaataattaaagaattatcattaaatgatattttcaatggatcaaatgaatttaaaggtttaattccaattgttaaagaatatgttgaaattgaatttaaggatatttcaaaaattcaacaaaacaaattaaatgcatatttagaattaatttcaggtagagcaagtggtaaaattttaacaactgcaacatttttcagaaattttattaataatcataaagattatcaaaaagatagtattgttccagaatctgttgcttatgatttctgtaaatttgctaaaaaattgagtgaatatgattcagattcagttaatgaattttttggacctaaaataggacaatttttaatagacaacaaatatgattcaatttttagaaactagatctataaattataaataataataacactaataataataacactaattaatatactttaccgtaattaccaccacgatgatatttcctcccaggtctgtaagttatttcttaatttgccattaccctttgaaatatcttccttttccactaattttatatctctttcataataccctgtagtttcaacaccgttttcactaatgaattacgtaaaaggaacctaaaactaaaacaatcagtacagttataaataaataccataacttattcacattagttagcagatttctttagtctattatactcttctctcgataatgttacattatcattatcaatatgtttattactacgtcgttgcattaatggtttgaagaagaatatagaatacagagagttataaaaaatttaaaagcggcttgaaaaattagagttagttaagtaatgaatatgattgtctaaatcttacaggtttaacagatgctagtaattgcatttcatcaatccatttatctgatatattctcacatacagttaagcaaggtaaagatgtgtaaatatgttgcaatgaacttagttgtgatggatttgcaatatgtgagataagtaaaatagattgtcgtttagtgttgaatgttgtattttccattattatgtgaattcctgtaatttctatatcttcaggtatggtaatatttgtcaataattctgatattttagtggaattaacaatttgtaaagttggtgtaaatgcattgaacttgtcatacttatttattgttgtttgtagatgatcgataattgattgtgatatatctgaaatttccaattcattacatatcaacaaagagaatgaaataccatcaagtaatgcctctaattctgtattaaattccaatttccaatcataattatcttctttgatgaactcattcaatttggacttgattaatgatttattttgttcattttgaagtataactatagttggaatacctgacatttctcttatttgaatttcaattttaattcttttacttttctcattctcatacaatcttttggattcaatccattcagattttgttgaagtatattcgttatcttgaaaatcagtgtatagtttagaagcattgaaaacatctgtttgtaaatgatttattaaatttttcatatcaagtagtttatattttaattcatcaatttgctttttcttgtttattatatctgattcaattgaatttatcttagattcagcagtttcatctttattctttagttcagtatacgtggattgtagagaatcatgtttagatttcaatttgttgagttcatcagttaattggtctgattcaattgaaagtttttcattgttttcatcaatttccttactaagagatgttttatattttgataattcatcattcatatgatttttaagcttgttctattttagttaataaatctttctttttcaattgtaaattttctaattttgattctctttcagctattgtctctttatcatcattatttgcatcattaactaattcttggaaggtttcctttattttttcttcctttttattaaattgtttgatcaaattatttttttgaaattcaattttttcttcaatttcagcaatttcaattgacattttttcagtttcttgtaaaaggattgaatttttcagtggtataccaatttcatattcaattattgaattatttaatttaatttcattcttctgtaaatttttcaaatttttacataattgattatattgaattaacctctcatcaatttgatgaagtagagtggaaagtgcaattctttcagcatttatatcagcagataaatgtgattgtaaagtatctaaataattatccaatgatgaagaagttgaacgttttttattagggtaatggtaatcttgaaggtgatattgtatgtatgtttgaatttgattttttaggggaattagaaggtgttgataatggagatgaatttcttgaatttgataattctgtagttgattttggtttaggtataagagatcgacgacgattattcattgtgtttaaggaaaaaaaaagttgcaggtggtatatgtatactagttcctcaactagtgatgttagatagtttatatagtggatagttggtatgaatatgccaaagaaatgtgatatgtcacaaaaagaaaaaatgaaaagtaaacacgaaataataattttattttttcatgtcgtgttttgagggatggattaattatatataggattagattatattagttagatgattatatatagacaagaagtgtgtatagatgtaaccatcattcttcctttgaatgaccaagtaaactccaagatcttgtaaatttagaaactgtacgtctgtaaacgaaataaagggatacaggaccaataactaaaataacacgaataaataatttaacataagattcagtaattttatcaattgaaggccaaattgaatcaggagcaggtaattcagttaatgattgaaaaatgaaaattgtagaaacaattgattcaattggttgaattgtaatgaaagcaagattttttaatttataaatatttgcccctggatgattaaaagtacgtactttttgagtattataatatctataaataatttcacgtaatgattgaagtaataataataatgggaataattgagaacgtgcaattttaggatatctatgaagaattaataataagattaatttagcaaatgaagttataattgaagatatgaatgaagtaccataaatatgacgtatgacaatatagaatgataataaatcataaattgttgagaataggagtaaatttatataaaaatctgcaattccaccaggtaaaaatcttgcccccgttagagggtataatatgcatagacgagatagtaggaaaatccaaaagaggagtgaagtaaaatttgcaagtaatataagtttttgagttttagtacgtgatgccattgtagaaagatatgatgagagagaataaaaagaaaagaagtagatgaaaagaagtagatgaaaagaaaagaaaagaaaagaaaagaaaagaaaagaaaagaaaagaaaagaaaataaagtgcatgaaaaagtgacaagatacaaatgagaaaacaagatcaagattcatgaaaaggaaaaccacagtaaacagttcgaaacaagaaccatacgaatataataacagaaaagaaaagaaaagaaaataaaattaaaagttatttttagtataataggattactaaggcgaggtattaatattaatattatggatgggatggaagctgttactttctttcatgttttcatctatttcaatttctattttgatgttttgactttattttgacttgacttgtatttcgttttattgacatcatctgtttatttcctcttgttttcctctgtttacattatatattatattattgcatttatttacatttagttttattataaattctatactgttgttttttctcttacccctttttctactccctcccttttcaactttaatcagccatggctccttataatattctatccattggtcgtcatccaaatatagctttctataattggagattaaatgcttcaaataatgtatctttaacaacaattgtttcaactgctgttttagatccttcaaatcaacctccaatttcaaataaatcttcaatctcttataattggtcttcatctcaatttggtaataatagatatactttagataatgtttatgctaatatagatgattattcaaatttaacttcatcatcatcatcttcatcatctttaatagattttattttcttatctgcaacttcattacaagaattatcaactatttgtgcttcattaaatccaatcttgaaaaatcaattatcaaatcataatgtaccaacaattataattgaatcaactaatttcgttaatttagaacctttcgttaaaatgtctctacaattagatgatcaaatcccaatattatcaataatgtcagatttcgatattagagaagttggtaataataattatttagtttataaatcaaaaaaggaatcagaattagtttatgttggtaaaagtggtcgtgaatcaagttataattctcaagaaattggtttaattaataaaattgcagatttatttgaagattcaaatattgatgtttataaattaaatactcctttggaattcttatcttatcaatggaaatttgctttaccaaaagttacagttgaacctttatcaatcatatttgaaaaacctttcccttcagatttacaaaatcaaatattggcaaaacctttaatatcaggtttaattttcgaaattattacagttattaaaacaatgggttgtaaattatttaatagttatgataatgaagaatctttattggaaagattatctcaattatatccacctgttgatttatcacctgatgcagctgaagctccaaaactttattatgatttctttaatcaaaatcaaccttatttagatttattattattacaaccaatccttaattgctgatgattatcatgttaaaactccttatttagaattcttatatgctgttatgtctcaatataattcaaataatttctcaactttaaataattcaacttcaatcttttggttaagaaaaaattctgaaaatattaaacaattaaaattacaacaagatgaattagcaattcaaaattcaattcgtgaaaaagaaattaaaaaggctaatcaaaatttatcaaataaaactcctccaagaggtaatttaaataattttactccacttaatagatcttcaactgatcctgcaattgatcctgaaatggttgaattatctgatatggttaatagttatggaattgctgataaaacccctccacctcttaattcaaataaatcatttagtagaagtgcaagttcaaataatttacaacctgctttcaataacaataataatatgaatattaatcaacaacaacaacaacaacaaccaggtaattcatctccaaattttatgcctcaacaaaatatacctcatggtttaccacctcaaggattaccaccaaatcaacaaatatttaattcaccacctcaacaactcggtaatgctggtgttggtggtcatccatctcgtagaagtcatttaaactgctcctaatggttatccacctcaaaatggttattcctcaatatcctcaacaaaatggttacccacctcaacaacaacaaggatatcccctaccaccacaacaaggatatccacctcaaaatggttatcctcagtatcctcaacaaaattatccacctccaatgaatcaatataattcaagagatgatgcatcatatatttcaggtcgtggatcttatatgaatggtagtacaccaaattttgatacatcatttggtagtatgactaatctgagttcaatgaataatggtatgaataatggtatgaataatagaggttttaaaccaacatcacgtaaaagttcacgtaaaagtactgcagttatgacaaattcaattgttggaggtttcccagatagtaataatgcattaaatcgtagtatgaatcaacgtcattctatggcacctcaattatcaaattcaaatttaagaggttcaaataataatttacaaaatttaaagaaacctcaaaatttcagtaataataatttaaacaattttacaccaccaaattcaaacagtacaaataatagtggtgatggtttatccaatggtagtaatggtagtttaccaccagctaagacaaatattgatttagttccagttcctgaagcaacacctgctccaacacctgcatatattccaacccaagaaagtaaaaatgataaacaaaagaaaaaacgtggatttttaggtctgggtaaaaagaaatagtttattaactttaatatcaaattcaaaataataaataaaaaaccaaaaaaaaaaactcacgttatcagttataactaatcttaatcattatattgcatttcattacatcttccatttcataatccatatattacaaacatttcattttcattttcttattttaatatttattttacattaatttattttacattttgaaaaatacatttacatttacattaacgataataccattatttcattatttattcttttaaaaaacttattaattatttaatttatgtttgttatttttgtatttttttcatgtttaaaatgttcagtttaataaatttataagtaattttaaaaataatactgtagaaaaaaattaagtaacatttcgtgacatgctttcatgcaaaaatctgatggattttactctaactatttcgttagataaagataatgcgtccaacacgttgggtattaaacacagcggtacgacagacgtttggtgatttgttgcatccaatcaaaccaacctcaaaaccaaaatctatcaaacatacaccaccaggatatgatatattacataataaattcaacaatgaacttaacgatatgaaacgattcttcaaatctacgcataaagataatgatgatatattaacaaaagatcaagtattatcattgttggagaaatatattacagtgggtaataatgctaatgttaaaataggtaaaaaattaaatgctaatcaaaggaaattattactagctgcatatgctaaggctaataagaagccattatctgttgggaatattaatggtgttaatgaattccagaggatgaaagtgggagtactgatgaaaagaaattggccgttgttgaaatatgttgtgaatgaatcaggaattaaaactgatgtcgattttgagaaagatgatgatgaaaaaattgaagtaaagaaagttgaaaaagttacggaagtgaaaggaataaaagaggttgacgaagttaaggagaaagatactaaatctgaaaattttctttcaatgttgaaagatttaaagaaagtccatcaaacaccagttattcatgttttaccatcaatgacaaaatttgaatatgatccaatgattaaacattataaagttcaatctaacataacacaatctgaaattgaacaatttgaagaaattttacaagaattgaaaactaaaagtgacaatcgtgatgaaaatctattcaaagcatcaaataattatgaatggtcaaagaatatgatgtttaaaatacctaaaactttagaaagtaaaacatttttcacaccaatttgtgtacctaatacattaataaatattaataatctccaaattgatttggttaataatttacatgataaattaagaaatgatttacagttttttgatattgatcattttaaaatacttaagatatatgcggatggatcaagcggaattttaacaaatgataaatctgtttattggaatggtaatattatgaatttatacgaactaatatctaacttgaaagatgcaacaaaattccagaaacgattcaatcaatcacttaatgggggttggatacccgtccatgcagatgaacgtgaaatagttttcgtattgaatcccagagattatataagcagtagactttatcgaataagtacaattggtattagtgcaatatttggtgcatcaatgatgataaatcttatgaattttatgatataacgataattaattatgtagaaaataaatataatatgtatttaaacagaaatctatgtgaacgtaataatattaaagggaattgacataaatagacaaaattattccatttcaatatctttaccatcatttaaaataccattctttttaacaatacaaaagtctaaagctgtaagaccaccatgaccacctttccaagctctaagtttagcaacattaacggatgatctcaaatctggaattttccaaccagtttcaaataaatgattttcttgctttattctaaattctaataaatccatttttttacttgggggtctatcagctcttcgttgttgtttcattttagctaattcatcattatctctatcaacaaaactttgaattaatgatttcatatcatctaaattataggcttctttctccatttgatcttctgaatttataaattcttgaataaaatcaacaatttgattctcttcagttttacgcattgtatgcattaatttcttttgattaactctatcttctctgagagaagctctagctaaaagctgtgctttccttccctttggatgaagaggggacttcttcttgttgatcttttgttggacctttaataatgattttgccattgtccttttgatctatatatcgataacaacttcaaagatagaaataagtaaataaaaaaaaaatatttttcatgtcaaatcagtaaacttccttaatagtgaaaaacttacccggaaattctccaccttaaaaaaaattattttttattttccgttttccatttccatttccaatgcatgaaagacctctggagttggtataaacttataagatttggatatatctattagttaacgggattttgctactgatattataatggtccaaagatacacagaacaagagcttttatcatatgaagcaggtgcatgtcttccagatggagtggatttaaccccatttctcactttggttgaaacagtttctgaattattaagacaaattgatgaagcaaatcctcgtcgtagatcttttagtcattacaaagctttaagaaaaaataagacaaaggaagttgttgatgaagatggttggacatcatttgttactgaaaaaaatcctgatagtgaaaatattgatggtgaatcagcaattgatggtgatgatgtcaatgaaaatgatgatggttttgaaaaaccaaattcaaagaagggtaaacaacatacaattaaaattaaaactaatgcatctaaaatttctagtggtaaaagtagttcagcaaatggtgatactgttgcaatcacagaaacttctaaatttaatgctttcgatgctttagccttagatgatgatgatgaataaggtttacaatttaattaacaaaagcttttattttttttacacacatgtatagtttgagctattttttttagttttacatattaatataataattattatatttatgatataaaaaagcattatgaagttaacttctctctgattaattgtttaatgtattcagtttctctcttgattgattgttttttagaaagcatggtttgctatcttcagcatactttttacttacttatattgttctcaaatcttgttttaaagtcgttaatgaagttttgctagattctcctcacaatattgtctcattttttgtacatcattttcaagtctttcatctctttcaagttgtttttcatacttgttcgtactttccttcttaactttttccatctcgatattgaatcttctcttgtacttcattccatatgttcaaggtatttttcattgtttcaacagctatcacctttctgtactgacaaattaactaatctaccttcattgattatggatttgagagacttatctaattcagaatcattatcattgacctcaacacgatgaagaagtggcagttcttcctttatactctgtaatgtttctatttcttcaatttgttttcttaactcctttttaactttattctgattccttcttttatcttcatcgtcctacaataacttgtggtttttgttttatgatatctatcccattattaaaatttatacgatcgtcattaataatcatatcttgtgtcaataataaattgacatcaatttcaaaatcatcaactggttcaggtaatgacttccaatttttgattaattttgtgctttagttgtttcttcctacgtttggcttccttttgtttgattttatcatcctttgaaatcagtcatatcttgtgtagcatcttcaagtaacctctttcttgaaaacataccagattttccactgtttctttctttcatctcagatatactagcaactattaattgatctaaatcttcattcatttccttattttccttaaactccaactttctacgcttagacaattcattcaaataatttgaatcatcaccttcatccactactttcggtttactcaaacttagtattcttcttcttttcatttagctttttattttgttctttcctcttcttatctttacgtttctgtatctcaacttcttgattgaatgtaccctgtattttagttcgcttatcaaacatattcttagtttctatatctatcttaagttcattcagacgtatcaaagataccagcttcagggtcttctttcaaatgctatatctgcattataatccatttcatccttaaattgttttttatattttaattgtctatcaattccaacttgttttaattcccttcgacgtaataattcactaacatttttactttcttccaataatctctcccttgcttttcttttcgcctttttaccttgtgtgtttgccaatcttgcttttgcttcacttatcatttccttttcatcttcattatcaacatctaaatccggtcttgcaggtttagattccggatttaagtttaatccaccaagtgaactacctgcaccagttccacgagcttgacctgattcaacattccctgtaagtaacaatcgattagctgtagatttctcaccatcctcaatttgacttacatcactattactgatcaattcctgatatcgttcaatacattgatttgcagttctgtttaataatagtgatatggaactccattgatttggacgtaattttgctaaattcaataacctcttatcctcttcaggactccaatctaatttcttaatacgtggatctaaccattcttgccatcttaatttacattgttttgcatttttccttgttaaaagtgatgaaactcttgaccattgatttaatccatattttgctattgcagctttaaggatttcatcttccacattggtccacataccacccttcacatataccggtgccatggttgactatatgatgatctatgcctatgaatatttcttgctaattccgtaaaatccttctgaaaacggaaggaacaatataattttttgtgaaactcaaattttaatgaagcttagcgtttgtattattatgatgttcatcaccctctattatttttaatacagtccacttttatcaacaagtcttattttctctggggttgttatattgtaacctaattagatctcttattgaatcaatcagagtatactgtatcttagttaaattcaaacttcaattgagtcaatatattaactagagtgtgtctttagatttagacagcacataatcattccatataaaagacttcacgatgcagtcaatgttccgaccaaaacatcaaaaattaatcttacaatgttatccctcaaccaagttgagtacagctgaaactaaacccaatcaagcagaattaagttatccttgtcttctatgcatcctctcgtagaactaaattagagaaagttggagaatttttattgaagaaaacaacagctgatatatcacatcaaagagttggtcatttaaaagttacattgtacattttacaagaattaattgttaaatgttccgaagatttaggatttatgacaccttatgttattagtattatgaaggacattatcaagttaagagatttaccctacatctcaattagcttgtcaagttttcattacatattgtgaaactttacaaaacattcaaagacaagttttttcatctaatgttacattactacagcaattcttagaagtaatttctttatttttgagtttttcatcaataaagaatagtagcggatcatcaaatgattggttaagaatatcattgaaaatttcattagtaattgcagaatatattgatgcatcatttagccaatttggtaaggatgatctaattcgtcaatcaatcaacttaattttagatacacttcaagtaaatcaaactgatttatcattaggtaaaacttaatacatctaattcccaagtaagtaaacatgcaaatgataattcaattgattcaatttcacttgatgaattagccacaaatgcattaaaaatgtttttcaacacaaattcaaaacatcaattggactctgctaccaatagtgtattaaattattcaattgaacataatatggaatattcgttggactaataatataatgataacatgtataaagaaatcacatattgaattaagacatcgtgttatgattattatttcacatcatattcaaagatatgctgaaaagaatgatgttaaaacacttggatatttacttagaattatttcaactattttaggatcaacattattacaatttattggattacctgttttagaaatatcaggtagaattgtcaatcttgaaaaattaatgattaaaaataatcaagttagtatcttaaaggaattgtattctgaaattgttagaaatcttgcaggtagagtttattataataatcaaatcaatgatatgataacaagtattttctctaattattattatatttgtaataaaactgatgaagatagattaagtgaagaacatttattaagctataccaaaatcattattgataatgtacgtgatattattggaatttctcaaaaatctgatatcattattaaagtaaatgacttcccattatcaattttcaattatttgtatttacaattaccttttgagcaacatccaaatatttcacagcaagtgcaattgatttgcttgaaactagttgaagaattttattctactattgatcaagaaactacaaaacatgctaattcagaaagttgtattacaagtaattctgataataatttatgtttattctttgaatctttaaatttaattctatcacatgatgttagagatgaaattaaggcacaaatttcattaactatatcagttatggttaaagcatttagaatcaacttattaattaattttgttaaagtttcacatgtttggttatcagatccaacatcattcaaatatgtattatcattattaattttgggattatcttcatctgaaattaatggatcacaaaaacttgcagaattagcagattctcatattgcgtattctcagcaacaacatacatggccagaatatattggatacagaccatcaacaaattcaagtgattctacattaactaatgatgaattgataggctgttttgaaagatattgactgaagtcaattattggcttgaacatattaatatcaaagaaccattatcatttaatagacaaataccaaaaccatatagtacactcattttgatgtctgcaagtaatagtattttatcatttcctaatgaatcatctggtgaacatatcaataatggaacaattaaagacagcatctgatacactatccaatattccagttccaagtatacgtcaagatggtaatgcattagatgaagtattaaataataatgaagagggaacatcagatataaatacaagttatacaatgagtgagaatgattatagtgatattgaaccaccgattcattttagtaatggaataatgagtggtaatagaagtttaagaagtggatttagtggatttagtggacgtagtagtcgtgcaggtggacgtcgtatgaatttaaatgagttgaaaagtataagaggtggaagtaattccaatgcatcagaattaagtaaactggttaaaatacgtacaggaagtacattgaatgcaattaataatggtggtgcagttgataatgtaaccagtaccagtcgtagtaatggaaccagtagttctggaagtgggttagcttactctataagtggactcggtcttgatgatgatgatgaagatgaagacgataatggtgataatagaaactatgctaacggtaatgccaattagaagaaaagagtgtgtaacaagtacatattgtaaataatactattattaaaaattaaaaagaagataattattcctaaataggcaatgtgtagaagtagattacatgccaatccttacgtaatacattgttcaccataatcatacttttctgtttatgcttcgatgctctcaatgtgttacataaagacaatagggaaagaaaaaaatattggaaacgctctctccttagggtatttttttctctatttgacctgtttactattatttatttatttatctgccttcactttagttgctatcagtttattacactttctgcccattttgttcatcttgcttatttatcaaccactttctctttatctttgcacaagtataactacctttcattgaacaattggcttatattcccctattatacctagaatttaccctctttttactctattagttcatacaaattttaattaattaacactcagatcaaacaatcaatatgggatttaaagactttttttcaaaaggtcctacaggaagagtaagtatactatctttcattcaatggcatttcaattgaaccataatatttttactttaattaattgttcagttatactaacattttacccctaccttcacggcccccggaaacttacttcctttcccgcccaatttaaatattatttttaaatagcattcctctgacactacctattaccatcaaggcttaccaagctcagctcatatggctgcaactagtgctaccaatactagatatcaaaacaatattactccaagtgggttactttcaacaagatctttgagagatcaacctcgtcaacaatcacatcgtacaatgtcattaactggtagaagttcaagacctttagatagccaaccaagaacaatgtcattatcaatgagaacaaattcaattaataatacaaatagaagataccaaaattcaaatactagaacaatgtcaatgacaagttcaaatgctaatataagaccacaatatatcaatggtagtggttcaagaacaaattctttgaattctgcatcaatttctcgacaacaatatcaacaaccatctaatcaacaacgtctttcaagaacaagttcaagaaataattcaagagctaattcattaaattcaaattcattgtcacataccaaaattattaaaacaacaaaggaaaaagatgctgatggtcgtactaaatcaattacaactacaactatcgaaaaaagaggtgatgttaaaattgttcgtacaacagtaattcaaccttcaatttctcaaccaattgatgaagatgttgaactggaggaattagcagaattagaagatttcgatcatgataatacaattgatgatttacattataatcatcaatcacctgcacaacatagtaattattcacacaccccaacaagaagaggtcaaaatcattttgatcattttgatcatgatttcgatgcagatgtcgacctgaatgaagatgttgatctggttgatcaaaataattatttgactgatcaatattatgaagatccaatgaaaaatggagctgctcttgcagctgctgcagctttatctcacaaatcaccaaatagaggttattctcaacatcatcatgatcaagaagctttaaaattaaatgcaagacaaactgaaattgaagttcaaaagcaacgtcaattacaaattaagcgccaagcggaaattcaacaacaacaagctcaattaaaacttgaacgtttagagaaaaagtctaaaaaaattatgcaatctagaatttcaactcaagaatctccaaatcaatctcaatttgtaactcctaccaaaaaatcagaagttagatttcatgatgatgaggcttttggttctgattttgatcaaaatgaacaatatgataatgctatctatgacaattttgcaaacgataaagtagttgaatcatttcaagatccagttgttgctgaagctgaagttgaagaaatcatggttgttactcctgaaattccacaacaaagtacatttgatataaaggcaagaaatagactgtctgaaattcaagaagtttccgaaatccatgatgattcaatgatggaagaaccgattgaaaataaatttattgatgaatgtaccagctgttgatgttattggtactattcctccaaacttaggtcgcaccaaaagttcctgttaataattcaatgtcttcatttaattctagtgaagataattttgttgaagcacaagaaaacttttcaaatgacccaccaggcaataactaatatcaatgaaagagttaatcaaaaccaattacgtttctaacgttgcaacaatccccaaaaactgaagcacaaaaccaacatagttatagaaatttgttagtcaatggagctacaaaatcaccagcttctaacaatattcctcagcaaaattatgaaggtgactatatcaaagagtatggtattttaacaccaccaggctcaaatggtttggtagattcaaattttaaaccagttgtccaacaaaaacaaccacaacaattaaaatctgcacttaagactagtgcatcatcaattgctagtccagcttctgaaccgcgttcgcagttcactaacatgacaccaattcaaccaaaacaaaaagaaataatcaaaggtcctgatggaattgaatctggtagagctgtgatgacacctgatgaaatgtatatgattgctctgaaagcggcggaaaagaaagtttatggtgatagactgaaccaagtttatccagaccctgatattgatgataatactaaattgaatactattgttaataccaatttgacttcaccacaactaaatgatgattcagtttccaaaccaggtgggcaatatcaatctaatgctacaggtttaggttttaaagttcactctctgagagatggtcatggaaaaccaccaaaggttaattctgaagaatccaataaacttaaaaagttgtttaagcaagagcaaaagcaacagaaaaaacaatggaaggaagaaagacgtgagaatattccagatgatctgctgaagaaagtagcagctaaagttgaaagagatgttactatgatgcctgttgatcctaatgttgaattgcaaatgatgcaaaaggaacaagataaatttttgaagaacaagagagaatttcaaatcagccaaaacctgaagtcgttcctagtcaacaacctgaagcaattacagatatttacgcaactccaaatgcaaaatcaccggttgatcattccaatgttataaatgttcaagaaaaatcaccaactagtgtgcctaaagttgaaaaatctcctagtaaactgaacctgaaactttttagattaactaaaaagaaaagtaataccaccaaagcccaacctggtcatagaaaaaatgattctattgtttcacaagaaactgagtattcaaatctgtctctgaaaaagcaaaagtcaaatggtagtagtgaaccttttaaaaagaataaattcttctcatttggaagcaacaacaataacaatgttcaaaaatcacctaaagaggtaccaaaagttgttgaaaatattgaacctgttgtcgcaacacctgttgtacaaaacgaaatttatgcacaacctgtcattaataataatgatatacacactataccagaagatgcaaatagtttagctggttcaccaatagtagaatcgaaaggacaaacaattgctaatgagacattcactcaaccagttattccaggaataaacgatgctccaaaaactgataataacggcagtattgaaggtctggaaaataccagaactacaaatgttgacagtattgctacaactaattctagtaaaattgccagtgttgctgaaaatttaccatcttcaacacatacaccaaatacggatattgaagatggagaagtctttatagatgcagaaacaggggaagaagcagaagttaaagcctgtccctgtaaaacccatcgaacctgtcgtcaatgaagttcctgcaaaatcttcatcaaagaccaaagcatctaccaagtcatctaccaaatcaaagaagagtaaaggtgaaaataagtttatgaagtttttcaatctttgattttctaaatcacaaccaatatacatacacacatgtgctcttttatgcttctttaaattgtttttgtttaaaattgttttattctaataatataattgtatatttactttgtttaatcatttgtatttctttaattgtttactttattgagctatacgtactatatctctaatttttgtaagtttagtgttctccatcgttactataccggctgtcccttgtaaataaagatttttatgcgggcttaaaaaatgtacttcccacaaaaattatttttttaagttgagttaaattatatgcttgtcagacattcaatcttatttcattcaaattgaactattcagaagaatatagccattgttactcaattcattcaattcatacactggtaaaaatggagtcatctgtaaagttggaaaatacagaaaaaacttataatgttgaaaatcccattgttcatgtaagggctaaaacattagcattacattggcatgagaatgcctcggcaatttatacattaacgacccagcctggtaaacctggtgaacgttcagctagattagttacaggtggtggtgataataatgcacgaatatggagtgtagattatagtgaagatggtaatgaagttgttggagtgaaatatttaagtagtatcactaaacatactcaagctgttaattgtgtgaggtttaataataatggtaaattattagctactgcatcagatgatggtacaattatgatatgggaattaagtgataaaatagtgagagaatttgggcaggatgttgatgatgatattaaggaaagttgggtaatgaaagttgcatgtttctccagtacaatgagtgaaatttatgacatttgttggtctccagactctaaatatatttgttgtgggttgatggataatattatacgtatatttagcgttgaaacaggtgtaatggtaaaacaaattgcagaacatagtaattatgtgcaaggtgtcgcatgggatccaagaggtaattatatttgttcacagagtgcagatagaagtgttcatgtgtacaaaataagtactggatctaatggagagttaaatgttggaccaactgcattctataaaagtattaaaggagagacgaaaccttccaaaatagttaatgagaacaaacaggaggacaagaaagatgaaaagaaggaaatcaaaccgaaaattgaagtcagtaatgatatttcatataaagtaccaactgctataaacagtgctaaccttcaaaatatggtttatgaaccaataataaatacaattcactcaagtaataacaatcaattaaccaaggaaaatatacttcacagtgttataactagtcactcatctgcgagctctacaatgatggaaccaccagcacaggctccaagacataaaagaacgtactccaattctagcacgagctcttcacatagtcatatcagtagatgcatttcaccatcaccaatgccattacctgcagttatgccatcatcacctagtcataaacaacttggcctgaccgcaataatttcttcatcaaataaagctacgaataatgataatgcaactgactcacgtacttctagtgtacaccttagtgctaacacatcgcttacttctgttaatgctgatacatcatcatctgtaccagcccaatctattaatacatcaaatgctacaacaataagtactacatcaaatgggccaagatatcattatttatatcataatgaaacgctacaatcatttttccgtcgtttaacgttttcaccagatggttcattgctaatcacaacgtgtggtatttacaaaaatgttgacaagaaagacgaaaaaaataacaaagaagtgatagagaatacggtgtatgtgtatatacgtgctggtcttaacagaggaccagttgttcatttaccaggattgaagaaaccagcaattgttgtgagattcagtcctgtgcgatattcattaataaaagcacataatgaagaaaacgtatttaatttaaaatacagaatgttgtttgctatagctactcaagatagtatattggtttatgatacacaacgacttaaatgtgttgcgatagttacaggtattcattatgcagtgataacggatattgtttggtcaagtgatggacgaagtatttttgtaagttctaatgatgggtttataagttgcgctattttaagtcctgaattagttggtgatattgaaggtgaatttaaggaagaagagatgaaacattttgaaggttatattgaagctgaaatggcgaataagaatgaagtagtgacgaaagcttctgaaaaacaagatacacctaaaaagcctaaaatcaacacattatcaacaaacttaattagaaaaaacaataaagcttccaaaagtgtttccacaaatctaccaccaccgccaccggcaaccatagctgtcgagcaaagtgaacaggagaaactggcagcaaaagaaaaaagcgtaattgaccttttaatgaaatctcagaaaaaagataaaaaggatagcactaaagttgatgctagtacagatgcatccaaaagactgtgtaaagataaatgaggacatttacttgtttaatagtataattatcgactaatgttcgtgtattttatggacaaaacaagcattaaacacatgcaattaatatacagtaaatttaatagaagagactctcagagcaatttttcactaagtgaggaaccactcttggtaaaatattaatatttttgatgttgaagttttaatcgataacaagacacttttcttttattagttgcacaaccatactcttgaaatactacatataataccatggactttcaccctgtaacaattgttttaggagcatttgttgctcttattttagttaattttttcttttttgacaatcaaccacctcgtgtgagtaacagagcttcaagaaactttgtggtaaccgatgagatgattgaaacagttcgtgctattgggcccggattaacaacattacaaatcaaggcagatttgcaacttacggggagtgttgaagctactattgatagataccttagaggttctattgtttccactgaagatataactcctgaacctgtaactaaattagaatcatcaaatactaataatttattatctgataatgatgggaatggtatgtttaatggtcttacatttgatcaaatgaagagaaaaatgattttggaaaacagggagaaatatgaagcaaaatatggaactattagtatataatataatataaaagaaaagaaattatgtatattatttaggtaggtgatgtaagttagttaatttataaacaatcaaatttactatgatctatcgaaatgtaatctgaacttatcgttatccttccgtactttataaacaaagttcattataacttcactttctttaacttgtaattgatttttaaaatgattttctgcattgatttctaaatctttgtcagttctgtaatcatacagattattttcagctttacgttgttcatttaatgcagctgattcagttctgtttcctaattcattgttttcaagtaacattccttgaaatgtatgtgcatcagttgaaagtaaatgtgatggatttaaataacggactctatattcacgtaattcatctaatgataacgtactgaaatcaaaagtttccttttgtgttgtattatctggatgattattatgaacatattttgcaatatattccttttgaacgggcactacgtatgggggtttctgtttttgtgaagttctagttgacattgttatggtgtttaataacagagaagaaagaaaagcagaagaaaagatggatgatttaaaaaataaattatactgtagcggaacttaaagttatttatttacctctttgtacagaacatgttggagtatattttgataagtaatcacaacattgaattagtaattaaatatattatatataaattaaagaacactgtataaaaacttatagaacatttaaaactgaaaaaatacccctatgaattaatcagaacagggaataccacaatcatctttaaatttcccattatcaaaacaatatttaacataattatgtgcaaataaacgactctttgtcaattctccaaccatattacttctttcatcatccgcccaattatgtgcttggataagaattaataaaaagaaaccttcaataatcattgttggagtatttgcaactaattgtgcagtttctgaccataaaagtgcacaacccatgataattaaacctaaaactgtaataactgatgcaataactgaccatttacttgaacaaatatcattaatccataatgaaattttagtatttattgtaattttcggtttatatctctctaatgtatatgaaataccaataaattcaagtaacccttgcgaatcttcaaataaatcataaaatttttgatgttcatatttagtaagtgaaaagaaaacttctcttaaaacataaccatcaataaatccaactaatccagtatatgtaccaataattaaccaccaattatcattccaatgcattaaattgccaattccaaaccacataatgaaaacacataatgtaatgattaaacctaaaccgttaccaataacattagcataaaaactaataactttttgaatcttatctcttggacatctctccacaacaactaattcattatcttcaacttcattcaaaattgttctttcaagacattccaaatcgctatctaattgaataaataattcaatttgtctattaataacatcattagatcttgctctaacatgttcaaggaaaacagatgtgaaaagtagttcaatcgcaactgcagtgttaatatacatttgccaattatttgaaaatttttgcattaatggttgactctttgtaccattattatttggaattgcaccacatccaatccacacaaaaataccaatccaataaagtataacacaatataaattacctagtaacttggaacaaacttcagacagtttatcaaaccatgttctcttattctctatatgtaataataaatcactttcacaattatctaaatcaataatcctctctttcaactcatcagttaaaataaaatcaggattctggtcttgcaacttctttattaaccgtctatgagttctcaatctactctgtaatttacctgataaaattaagaatttttcattatcatctaattgttgtctcataaggaaagtatcccaaacataagtttgaatagactgaccatcttgcataacaatttgccaagtatcaggtgcactcgtcacagcaccccaaacaacccatgcaattaaaattaaaataactaaaattaacatataaatagaacctgtaacatcaacagcataaccgatgaatgtgtccaatggagatgtataatcattatcagattcaaattcctccagtttttcaattttttcaatatcttcctcttgttttttccaaatattgtaaactttattcggaatgtaattaatcacattcataaatttgcttttatttgaactttcaacattacttgtactagaatcatcagtatgagaattctcaaaaatttgatcgtcctttttaacacttataccatcagaattaaagtttttcggagttgcaatattacaacgaactttaatgtcacccttatttggcgggattaaaataactttaacatcttcccaaaatgtacttgaaggcatttttaccaaaagtaggatattaaatcagtggtaaaaatggcatctttgtaacattagtttaaagtaagaaaatatgtttccttataagagacaagcccaagctaacttctatacctcatcaagtttaattaacatagattatagaaagactataggtttattcacaatacgcaaccgttgaaaatatgtcattcactaaccatatataacaatgcatgaaaatctatcgaaacatcaggtggtggacccttaaaatttttctagcctcatgataagaattgatgatagtatcaattaattaaaccacaataggtaattgctatcacctgtcattcggtggtatcggagaaggttttatcaatacctgatttgtctgttactgataagaaaaggacagtaatggttatagttatattgctcttgtataaaggtatttttgtgaattacctgattaacctaaaaatggttagcatatttaatcaaatttttgatgatattttttactaatatcagctagtacagttttttaatgatagttatattccttttcaattaacctagtaaagtgaagatgttggttaaccaaagattaatctctctatgtgtagtataatatactgaattgaactgaattgatgtggtattaaattgatgtatcgacgaggcttggaaaaatgtattgtcgattaaatacagtacatagttgctcattgagatgttcaacaagagttgttaattttcataacagtatctcttctattataagatattgataaaagaaacagttgtagcaacaattatggaaagtaatgtcccaagtgggtatttcagatgagcaattattttgtttggtgaactttatattgatcaaaccagtaataacatcggtaatatttcaagacttgtcgtatataatgtaatcaccatcggtgatactgattagtatacatcatcaacaatgacaaaggcatatagatcatagagtctttgtaaaagtagaatttccgacaattcaccctctcttaattggtgaaaattatgagatcatggaaaccccactgtagtgagtctttgtatagaaggttttttctttaaagcaatattgcaatgttcagatctatacaaggtactgtccgttgtcacattaaacctatcataagtaaaagatcatattctttaattaataatggtattaataccattaatataagaacttcaatactaaacaataatcacacattaccaatcaaaagatgtaaaaattcaattaataatttaacatatcaacaattaagatttaatgcaattactgcatcaactgatggatcaaatatacctgaagatgttaaaaatttaacaattgaagaatatcataaacattcatcagaaacttttgaacaaatgcttgatgaacttgatttattctttgaagagaataaaataatggaagctgaaattgatgaagaggcaggtgttatgcaaattaattgttctgaaggttcttatgttattaataaacaacctccaacaaagcaaatatggctgagttcaccaattagtggtccaaaaagatttgattatcatgataatcaatggatttctttaagagataatatcaaactttctgaattattacaagaagaaatgaatttaatgtatggtaatttcaagtggtcaaaacctttctaatttgaaattcaataaataatacttaacgatctatataattctttataaataaataaattaaaatactaaaatactaaaaaatgcatgtttataataagtcaacttttttattttcattttcaattatctcttgttcaataatttcttcattattgttttcattattattactattactattatttttaatataattgtaaataatagttcttgatttagttaattcctctaaaattaaactacgttcacgacttgcccaattatgagcttgaactaaaattaataagaagaaaccttcaataatcattgttggagtatttgcaactaattgtgcagtttctgaccatttcattgcacttgctaaaataattaaacctaaaactgtaataaatgaaaaaataactgaatatttacttgaacaaatattattaatgaaaattgaaattctattagatattgtctttttcaaaactggtctatttaattcaactggtatatttaacatatctaaaaattcttgtgaatcttttaataaatctaaatattttttatgttcataatcagtaattgaaaagaaaatttctcttaaaacaaaaccatcaataaatccaactaaacctgtataagaaccaataactaaccaccaatttgcactccaatgcattacattaccaataccaatccaagcagagaaaacacaaattgaaataactaaacctaaaccattaccaacaacatgagcatataaactaatacatttttgaattttatctcttggacatctttcaacaataactaattcattttcataataatcattattaatatctcttaataaaaattctaatttggaatctaatttattaaataatttagtttgatttgaaataaaatttgatgctctatttctgatattttctaagaaaatagttgtaattaataattcaattgcagttgcagtattaacatacatttgccaagtatttgaaaaagtttccatatctggtaattcctttgtaccttcattaattggtactttaccacaaccaatccaaacaaagataccaatccaatataaagtaacagttggtaaactaccaattattttaacaaaataatcacaacatttatcataaaaactagtacttttaaaattaatttcactatcaatattttctttattataatttaaatcatttaattgtttaaaatcatttaattgagttaatgaatgattaatatcatattttgataaaaaattagttaataatcttttatgagtaattgatctacttttcaatttaccatataacagtaataatttttcatcattatctaattgttgtctcataaggaaagtattccaaacataagtttgaattgattgaccatcttgcattacaatttgccaagtatcagaagcaccagttaaacaaccccaaatgatccaaccaattaataatgacattgcaataattaaaacgtatatagaaccagctacatcgactgcataaccaataaaagtatctaatggagaggtaacataatattcatcattttctaattcttcaactttgtgaatttcatccaaatgttttttaaataatgaattaattaaatttctaaatttatagagattagattcaaattttgataaatttttttcattaacttgatttttctctgatacttcaatatcaatattattatcaattgaaagacgttcaggcatttcacatcttagtttaatagcaccttttttaggtggtaataaacatgctttaatatatcttagaacattcatttgataattaaagaaagtaaaaatgtatgaaaaagagacaataaaaagggttaaacccttgaatttataataaaaaaactgacaacacgtcaaatgtgccttgtaccttgaaatctataccataaataaataataaataataggataattaccgagtgttttaaaaataaattcaattgccgataaatttaatatacacggtgtagtgggataagttatacagcaaattaactcagttgctattgtatataagtataagtcagtatattacatgaatgttataataatagtagtagtattgtctatatttaggaaataaaagaaaagaaaggccttaccctaagcaataatatagtcctaataacttacttacttatataaagaaaagacacaaacaaaaaagatgagccttcacataacctcgcgtcgatgcgactacaagagagagagaaaaaaaatttttccattgattacatcacaatgagtattggttatttaatatttaatatttggtatttattaatttttcaagtttttttgttgaaaggtctggtctggtctgggataaattttggttttgaaattttttttattgaatttgtttgatattttacatttcttctatatatttccccttctaagatcaatacaatgtctatctccgcatcaaaggctaaaagagaagcaaagaaagctgctaaattagcagaaggtggtaaaaagagattaacaaagaaggaaaaggaaaagcttgaaaatcaagatgttggtgaatcagctgctgaagcaattgaaaaattaaaacttcaacaagataaagatggtttatctgatagagttacaactggtgtcttagattctttagttacttcaagagatattaaaatgtcatctgtttcattattatttcatggtaaagttttaattcaagattcaacaattgaattaaattatggtagaagatatggtttattaggtgaaaatggttgtggtaaatcaactttcttaagagctttagctgcaagagaatatcctgttcctgaaaatattgatgtttatttattaaatgaacctgctgaaccaaccgaattttcagctttagaatatgtcgttagagaagctgaagcaactttagctaaattagaaaaagaagttgaagatataattgttgaagatggtcctgaatctttattattagaacctttatatgaaagaattgatgaaatggatccttcaacttttgaagcaagagctgcaattattttaactggtttaggttttaattctgttacaattaaaaagaaaactaaagatatgtctggtggttggagaatgagagtcgccttagcaaaagctttattcgttaaaccaactttattattattagatgatccaactgctcatttagatttagaagcttgtgtttggttagaagaatatttgaaaaaattcgatagaactttaatcttagtttcacattctgaagatttccttaatggtgtttgtactaatatgattgatatgagattaaaacaattaatgatgtatggtggtaattatgatgcttatgcaaagacaagagaagaacaagaaacctaatcaaatgaaacaatataataaacaacaagaagaaattgttcatattaaaaaatttattgcctctgctggtacttatgcaaatttagttaaacaagcaaaatcaagacaaaaaattttagataaaatggaagctgatggtttaattcaacctgtcgttcctgataaagttttcaatttctcattctctgaagttgaacgtttaccacctccagttttatcattcgatgatatctcatttgcttatgaaagtaatccagatcaattattatataaagatttatcattcggtgttgatatggattctcgtattgccttagttggtccaaatggtgtgggtaaatcaactttacttaaaattatgactggtgaattacaacctcaacaaggtagagtttctcgtcatactcatattaaattaggtgtttattctcaacattctgctgatcaattagatttaactcaatctccattagaattcgttagaaataaatattctcatatatctcaagattatcaatattggagaggtcaattaggtcgttttggtttaactggtgaaggtcaaacttctcaaatggcaacactttctgaaggtcaacgttcaagagttgttttcgccctcttagctttagaaaaaccaaatattttattattagatgaacctactaatggtttagatattccaacaattgattctttagcagttgcaattaataattttaatggtggtgtcgttgttgtttcacatgatttcagattattagataaaattgcaaaagatattttcgttgttgaaaatcaaactgcaactagatgggatgcatcaattgctgaatataaaaagaaattggcaaagaatgttgtcttataatcctttcttatttattgcaattttcttttcaaaatcacttttcttaatattctatgttctttttataatttaagtttatttaaagtataaattttaattataaggtatatatttttcttgtgtattgtagatcatgacataactttacgtctcttaccagctaataaaactttttcctccttttcatcattatcaatacctactttttccaataatttactgacgtcgtcaatactgttaattccattatctaacctcactctagcagcaaagacaactccttgtgcccaacctgcctttaattcccaaaactctttgaaaaatctttttacaaatgggtatattttaacatcaactgctttattacttaatgatttctttaatattgatttatttatttctaaatcatcattatccattgaatccacccaattattaaattctgttcgatattgttctcttaatatattccaaacatgtgtatcaacgggtactaagtcatgacatttacatcccattaatgcaacacaatcggcaacttttggcccaacaccatcaaattgttttaaaaattcaacgcatataatatctctatctattttatcaattgtttggaaatcacagctgttaagtttttcaaataaaattggtgtttcaatcattttagttacagttttggcaatatatttagctcggtaaccaaaacctaataatcttaaatcaggtttccaatttggaatacatttcattagatattatattgctattcgatatctccatatttttgataaaaatcaattggttttggaaatgaataatacggaacattggaatgaaaccctaataatttaccatatttcatacaaagtacttcacagagttgagatattctcttgatattattatttgatgatatgatgaatgaaactaatgtctcccatggatcttgctgataaaatacgtacaccataagatggatcagtttcttcaatttctaacttcggtgaatctctagtacttggaggtggagttggtattatttctgaaaatttctcttcctttatgtttaatattgattccgctaatattggcattttgatattcttatctattttagaccaatgtttataaagttctaaagttgaaacatttaaattaaaataagattccaaaaaagttttcgtttcaatgcttggaatcatttgattctggtatgtgtgagtattctattatacgtgtattttcgactaatgattccttcaatagtaaaattttattatttagggcacatgaccaaacagccatcaatatatctccatctaaaagcttgtccacatctcaatactgttggtaagtctagttccaaaggtgctattttcaacgtttgccatttcatctttgcctaaagaaagaatataacgtgtctgaaattcagaaatttaatcttttcttttatcaaatcaatgttatcactgttaaaatttttttttcgtgttttggagttaggcgttagtttgtcatatatttctatttctatttctatttctatttctatttctatttctatttctatttctatgtgtctcaatctatttttattaaagagatagttttatacaagttataaaataaatatccattaggtagcttcctctgctgttcttctattagtagctaacttaatttctacaagtttacaaattgtatcattaacaggtgcagacatttcattttcaattgcctttttaacaatatgaccattaatataatcaatttcaatatttcttaaattaataacatcttgacgcatacttgttgaatttttaccattaattgtacatccaacatatttaacaaaatctaattctttttcagtatttaataaatctttagctaattcagatgattgtaatgatggataagctttaaataaaactttcaaaccttctgatataattgaagtaaataattcatcagtttcctttaaatctgataatttatgattaatacaatcaacaattgaagttgttgcattcatacaacaattaactaagaatttctgaatttgataaactaataattcatcatatgaataaccagttacatttaattcaccatttaataatgcatcaatgaatttatcgttacgcattgaaatttcatcctcttttagttcttcaagtgaagcttttaaatttcttggaatttgacaaattttaagataaccaaaacctgcatgattgtaattataagtattattttgttcaggtgattgccaaacaccatgagaaataacaccttgataaataattggtctttcagattcctctttccaaagtttttcatataattcatcaactacacccataccattttgaactaataaaattttagtttgattattgattttatttaataatggagttaatgcatttacagtatcaaaagttttcacacttataagtaaaaagtcaataacaccatcaggtatcgtttcagtagtatatgctccattgattttataatctataattttatcattattgaataattgtttgatttggaaagtattgttagtattttttagataatttaattttgcagcatttcttacaatgaaattaacattgaattgtttagttaatgatgaagcaattaatgtaccaacaccacctgcgccaaggacgtaaactgacatatataaaggaatttgtttggtgagtacaattttgtgtaggattttacagttacagaccattccataattgaaaaactacggtgaaaaacttattgtcgacggtgaaccaatgaattttcttgaaataatgagaaacgccacattaatgggactgtaatgagtggaagtttgatttaggaaatacttggtatatacgctacatgctgaaaagtttttatattcgatttatctgaatgataccaagtatttgatgtttcttgaatataagaaaagaaataggaatgagataaaaatgtattatctcaaatccgataaacacatctatcacaagaaaactttgtcaagtaaatagaaatagtatctaagtagtaatatcaaagtagtaatatcaaattaaattgcatataactacttagggtgatttaatctatatcaaccactggatatatactttaagcaacccgctaaaagaacaagatatatctcatcttctacactgattacccaataaggaagctccaagatgtactgagagatgatagagggataagtaaaatgactgaccctttcatatctcttccgccctctctacagatttgaaaacttgtagactcagatgtaataggcattaacgttagaaataacgaacatcttaatgtaatctaaaacagataccgttctgctacaccttcctatttgggcttatcaatctgtgatttattcaagataaggatttaaattttcatattattgttatctcttgtattgatgatgacgaaagttgtttaatattcatatccaagtagagatgggagtgtactagtacggtctaattgctatcggtatattctaatttacttatttatctaaggtgtgtgtaatcttgatttaattacctaggttatctattatccttaatctttaatcttttactatctttcactgccttgatttttttttttcaatctataatttttattgctatttttataaatattgacacaaattcctcaatcttaagcttaacagataacgtatattcaatttagcttgactatttcttctataagcaaatatattttacatttcttagtttcctacaaaacaactatcaaataatgtcgaatatggaacttaagccaaatatgtcaatcatatcggttgatgatatgaatgtgacatcagttttatctggtcgtcatgaaaaaattgtaatggatcataatgttgatcatgatgaagccgttatcttagcactgggttataaacaagaattcaaaagagaattctcattattaacaacttttggtgtttccttctctgtcttaggtttattaccttctattgcttcaactttatctgtattctattagcttattcaggtaatgctggtattacttggtcgtatttaattggtatgattggtgttatgggtgttgcttgttcaatggctgaaatttcatctgctttcccaacttctggtggtctttattatgcaactgcaatgttagctcctccaaaatataaggcaatattatcttggattgttggttggtcaaattattttgttcaagttacaagtgctccctctgttgcttatggtggtgcttcaatgattttagctttaaagcaaatgaatggatgaatagttatgtttatcaaacttggcatgtttatttattaactgttggtttaactttcctttgcagcgattcattgcttctctaccaactaaatggattgcttggattaattcagcttcaacaatgttaaatttaattttcctttttgtttcttggattgttgttttaggtggtaataacagagttgagcagggcttacctaaatttaattcaaataaaattgcttggggtatcgataatttaactgaatggcctgatggaattgctatcttgatgtctttcatggcatgttatttggactatgtcaggttttgattctcctttccatttaggctgaagaatgttcaaatgctcaggttgcaactccaagagcgattgttttgaactgcttcagttggtggtctattaggttttgtctttcaaatatcaatgtcttatacaattgttagtgttgatgatgcggtcaatgcagatttaggtcaaccttatatttcctatttagcccaaattttagatactccaagagttttatgtcttgcatcatttgcaattattcttgcattttacaatgactttctcttgtatgattgctgcttcaagagtcttgttctcttattcaagagataattgtttcccattatctaaatattggtgttatgttaacccacatactcaaactcctgttaatgcagtttggcttaaattggttatttggttgtttattatgtttacttatgtttggtggtgttgcaattgatgctattttttcagttggtgcaattggttcattcatctctttcacaattccaactttgttaagaattacgtatgcacgttcattcttcaaaccaggtccttggaatttaggtagatattcttatatttcaggttggttagcagtctcatttactactttaatgattccaatcttatgtttcccacaatatagaggtgcagataatactgcagaagaaatgaactggactgtcttagtttattatggttcaatgttccttatgtattgcttggtattacatatatgcacataagatttatgatggtccaaagagtaatttggataaatcaactcttattgaagatgaaaatgaagaatttcaaattattgattcagttgttagtaaaggtggtgtagttaattatgcttctaatgaagtaaatgatgaaaaggcataatttcattaatttctaattatcaaattttaataatcttttacgtatatattttttttgctatttatattctatttttcatagaaattaatcagttatcatataagtttgaaatagggggaaagaatttgtagaaatttgaagtaatgccatgtacctatgtcaatatgagttctacaattagtgagtcagtcaaaaaaattgcacctgtgcatgtatacatagcaaattgatccagcaaattgatcctttcttattatttgagttgatacagttttgatacagttttgatagtattttttattattatgtgttatttaatctattgcttagcggatcttcttaaatctcctattatatgatgataacttatttatcgtgatatgacaatttattgttctatttaaaaattattttgtgatcaaattaaagaaagcggaagagagttaaaataaaattgtaaaagcattaaaaaagagacataaagtacataagttgtttaacaaaccataagattgttgatattggcggtttttctggatcaaatccaaaaaagctacccttacctgaaccacttccacgattaccatctttttctgaaccacccttacctgaaccacccttacctgaaccacctctacgacgattacgataacctgagctccaacgaccgcctccactataacctgtgctacctttaactccatcttctccaaatctatcataaataaatctttgctctggatccattaaaacatcataagcattagttatatacatatatacttaatttcagtttctttatcaccggagtttttatcaggataaaattttctacttaatattctaaatgcacgtctgatttccttattatcagcctttctgttaacacctaaaatttgataataatcggatgttgcaaaaacaactgatgaaaatgttataaataaaaaaaaaagtacaatcggtgatcttatttatcttgtggttattttctaatttaagtgatcaaataaaggaaattgataaagagatgttgaattgtgaaattgtgatttatagtatttcgatgagcagactataatcaatctccgaaaggctcagcaactaaacctctgatttgacgcgctatataaattttccatcttcaccattttccaaatcactgtggcaattaatattaatttgacgatttgaagaatatcttactggtgtcttttccctttgaacaatggttttacataacgataaatggaagtataaggcgaagaaagctgttgagaggaaaaatgcacaaaaggctaaaagaaatggtattgatgataccaaagtaaaccatgaaaatagttctagtggaaatgaatattcaagtgatgacaatgaggaaggatgtgatgttgaagaaattgttgacgaagacggaaatgttatagtgaaacctaccaagaaggggaaattgaagaatcagagtaattcatggagatttgaagatccagtcattgatgaatcaatccttaaagatcctgaatatattgcacaacttgaagctaaaaggaaagaagaggaagatagaatcaatcatatgagagatattgtttcaaataaattgaaaactggtgatattattgatgaaaacagtgatgaatatttacttatgggtaaaaaagaacctgttagttttaaaaatatgaaatttgaagatttagaaaatgttttcaactctgatgataaagacaatgataaacgagaaattagagaatttaccgatgaggaaagagaaaggattttttcgtaatcaagcaataaatgaaacatcaaaaggaagtacagaaattaaaaacacaggttaattcattaaatagtaaattgacacgagggaacgttttagaactcaactctaatcgtgggaaagataattatagagatttagttgacaaaaaacttggtggaatacataaaaaagtagatgaagaagcagatcttgatgaattagttcatgaaatgataggtattgatttgaaaaaagttggtgatacaactgcaggaagaaaacgaattcaagtcttctgcagggttcaatttagaaaatttaatggatacaaaaggctgggactaaaaaatcaaagtatacgacagcagacaccaaaggaaaagaaatcatttgttgaaacttctaatgaagatgacgattttttggattctcttctataatattatcattacttatatagataaacaccacttgaagattctctaactgataggactattgataatagctgtagttgataccatccgtcaatgggttattgtacttgctaataaatagcaaattatcactgtatttaaaagatacgattacgtaatataatagtttattagtaatcgttatcatttcagattgtatactctggacaatcaggatataacttaattgcattctttcatttcttcaagatctctctattaaacaaataatacccttacaacaatgtatattccacagcgacatagtataatattgaaacagtactccaaatatctattgattagtacaataattgtactttttttcacatttcaatataaatcattcactaaaccaccatttcctcatgtacctgatattccagctcatataccatttcactagagctgcaacatgggatcctgaaacaaatcatacagttcattctcaaaagggtatagttgcatctgattccgagagatgttcaaatatgggtattaatatcttaaggaaaggtggtaatgcagctgatgcagctgttataacagtgtttatgtattggtgcaactgatacaatgttttcaagtggtattggtggtggtgcatatattacatccaaaaatcataaagaggaaagtgctataagtatagatgcaagagaaatggcaccaggtaatgcatatcctgatatgtttaaaggtagagaacataaaagtaaatatggtggtttagcatctggtataccaggtgaattaatgggtctttggaaattatttgaaattccatggttctggtaatattaaatgggaagaattattattaccagttgctgaattaatggaacaaggttgggaagtttcaccattatttgcatttgcattacaaactcagagacctgcatttaattatttccgtaaagattgggattttgtttttaaaggtaagaatagtaatcaacttttagaagctggtgatataattaaaagacctgcgtttgctcaaactttaagatatcttgctaaacatggtgccttaaaattttatgattcaaagggatatattgcacattcaatttcagaaactattcaagaatgggaaggtttaattactcctgaagattttgataaatataatgttatcattgaagatgcaattacactgaaaaatttcacaaatgataatttaacaattttttcaccaaatggttcatcaagtggactttcattaatttcaggtttatcaattatcaatgaaatgcatttaaatgaagaaattcaatcagactataaatgcaactagtgcacatagaattgttgaagttatgaaatggatggcatcaacacgcttcatatcttggtgatattggaatttacaattactaataatactcaaataaatgagagaaaggaaagatattctaaatttttagcaaaaggttttcattgactgatgttgttagtaaaatcagtgataatgctacacatccatgggaatcatataatccagcatttgaaccaaatgatccacatggtacatcatcattgagtgttgttgatgaatttggtaatgcagttgttataacaacaacggttaatcttcttttcggttcatgtgttcatgatccaataactggtattataatgaataatgaaatggatgatttttcattaccacatacgaaaaatgcatttggtttacaaccatcaattttcaattatattcaaccttataagagaccactatcatcatcagcacaatcaattattgttgattccgatggtaatatacaattagtcattggagcagctggtggttcaagaataactaatgcgatttttcaaggtatcatacgtacatttatggaaggtaaagatttaacaaatgtaattgcaaatccaagaattcatcatcaattattacctgataaattatctattgaagaaccgatttatcagtcatgttattaaaggattagaggataagggacatgatgttgaaatatctaaaccacaatctgcgatgaatgcaattagagttttatcagatggcacaatggttggacaatcagattggtggagaaagtttggtgtggctgtagctctatagagggaaaatttgaaattttttgtaatattgatcagtaaaagttttggcgttttttttgatattatgtacttgtttctttctttttgtaatggaatagatggatctattagggttatctaaggagaatgaaagtaaattatgcagtcatttaatagaaatttctaaaattgttcaaaataagaaattacaagaattagaacacgaaaatgaaaaattacgtgaaaggaatgaatcactagaaagagaaatactttcattaaaaaatgaacttagtaatagaactaataacaatacgaaaacaactttaacacaagatactatcataagtgaaaatggtaatgatgatgacttccgatatgactgatatttcaccaattaaatcacaacaagaacatgaaattttgattaaatcagaagcaagtacaaaacgaatacttttcagtactaatagtgaaaatgaggatgatgaggatgatgaggatgatgaggatgatgattagtaataaacgtgttaaaaaggaatcgatatttagtcatataataaaagaggcaccaaagattaatttaagctcacatccctatgctaaatagatcgtggtatcctgaagattttattaaaaatcctgaatttgagagacaaattggtgatagagcagtttcaattaattcattaacgaaacatatttcaaattattataaaagacagcaagattatatgagatcaattgcgataaaggattttcactaaaataagtgaactgaaaaattatcatgatgataagaatgaaaaagacaagagtgttgatgaaaatggtgttaaattaattacaccaattcaaaatgctgatattcatttccaaaataacaatatatcaccaatttataaatatgaaataaataaggataatttagataaatatattcgtgcatatccaaatattttaagaagtgataaagttaagaattgggaaattgatgattcgttggaatataatgatgtttgtgaagattttctgcttacacaagaagttaaggataagaatgaaaaggcacgtgaaagatcaagattgaaagcattatacatgttatttcattcatgttttattgttgaaaatagtaaacaagttggtaattatattttcaaaagagaagaatttaataaattagtatgcaattcaaatttcgttattgacgaaatgatttttaaataatctatagaaaaaagaaaaaaaatataactaattaacaggtaatgatacataacatataacataacataataatgacataacaataaaagacataacaaaaattatcatatataataggaatttactttttattttttttattttcaatatcttctaatgatttacaataatgagttaatgcaagtaatgttgggtttaaatcagctgatgaagcagatgatgataatttaaatcttttagattcatttgataatgataaaggacttgaattagaagatgacttactttctgatgaattattattgttagtttcataaaacatacttaatggtaaagttttttgaaacatctcataagcagctaaagtaaaaccaaattgaggagatgatttacaaactctagcaacaccacctttatagaaagctctaataccctcttctgttaatattcttttaaaagttggtaaaatacctttataaggttttataccctctattggttttgattgaattctagttttaataacatcacaaggagttgttaaaaaagctgcaggcataccagctaatgcaccagaaataagtaattcatgagggtctaaatttgatcttttaccaggtttaccgggatctaaattaaataatctttttttaatattagcataggttgggaaataaattgatgagaaaggtatatctcttaataaacaagctgtaacaccacgatataaaccttttggacctaattccattacaatttgtaaagcatttttaggaataatttgagttccactattggaaatttttgattgttgaattaattcaccttgagtttgcagtctaattttagtaacttccaagggatttgtaactgcaacttggaaaaaacctgcagttgaaccagctaaaatttcccaaggtaaagttatatcaccatttggagaatttttactaccaatacttctaattaaatcattcagagttaatttaattgctttttcaggtgcaacaccaataatttgtggtaataaacctgaatacagacctaaaataccttcatttttaactaattttgcaaaacaattaggataagaagaataaagtgaattacccttttgattttgcattctagttttaattatatcaattggataaacaattgatgaaccaatcataccagctaatgaacctaatatgaatgaatgaactgatttaaaaatatgtaagaaattattgttagttgtagtggtggtattggtagcagtaattggagaatttaaatcatttggtataaccatatcatctgtcagtattgctaataattctgatggatcaattgaaggatttttctttaaatgatcattagtaaatctgttccagttaaaatatagtagaacttcatcattggtgatattatgatttgatgaatttactgaagatgaattttggatataattatagagagaatttgaagttaaataaaattttgaatcatttgaagataatttttcataagttaaataatttaattttggtaaatctcttaataatttaattaatttaagtgaatcattataatttattgaatcaccatacttataataggcaaattgtttaaaatgatttgcaattgagggagataatttattataaaaaatattttgagctatatcagttaattgagtaggtgaaatttcatcaattgaatttttatattgattgaatgaagatttaaattttaattgaggtaaattatccattaattttgcaaaagttttaaaatctattacatctttattcatatcattcatattattataatttataatagtttcatcattgaggagggatttaaagaatggtaaatcttgagggttataattttcaacaaaggataagaaagatgaatttggtattgagaaatttagtgaataaatatttgaatttgtagtataatttggatcattgtataatttacaaattaggaataaaactttattaatatcactatctaaatctgaattttttagattattattattattatccttaggtaataatatttgatttgtaaatttattaaattcatcctttttcaaataacctttatgatcaatatctgaaatcataaacagtatatgaaatatatccaatgatacgaaagaagcaatttttgataaataaacgaattcattatgtttgaaaatgtcagaagaaagtaaatttgaaaaatcgggttgtttaagtactttctccgaagatgagtcaggataaaatttactatacttatcaaataagttatccattgtatattgtatgaagtgtaatagagatagaatataattaaataaaccatgaagagaaagtgttacataaagttaaatgaataaagtgaataaaatacataaaaatttcataataaaacattaaaacagtcatagggttgtatacatgactattccttatcagagataaatcattcggcgtaactcctccttttctcccccgcaaattgactattaaatactattactactattacgtaagcattgattggaaacgagccaccgtggaatttaaatttttaactctgcttattcttataagtgaaataaatcctaatactgcaatactgataaggaagatataggtacgtctacgttgctttaatgaaaatcttttcaaatatctattaactccaactgccatatgatatgaacctgtaattactaatgcatttaatcctgtaaatgttttccaaaatgtattttgaattgcaaatccaacatatcctaaatcaattaatgaactatctccttcaattttcaatggtaataatctttcataatatacatgtcccaataataatattaataatacatatcctgaaaatgataatggacttaatccaaataatttacttgtaattgatttccttgatccagctccaataattgaactaattccacctaatccttcatcaatatctttaacttcaatatcttcattattttcaataactcttcttttctcaattttaacttttttagaacttttaccatatttacaataattttgatatcttttcaataaattaatactaaatccactaattacatgtgcacatgtactaattaatataccaatttcaataattggtatttgatataattctctaccaagtccaatcatatcattacctgtttcaataccgaaaataccaggtgttataacaacactaaataaatgaatacttgaaaaacataaaaatggtattgttgaatattgttgaattttttgtaaaaaatttatacttttatttaaaaatgatttggaatttgatgaactatttggtaatgatattggtatacctggaattggctcaggtgcaatctcctgtaatttacttgtctccatgctcttgcttttattaaaagaaacaaactttacttaattttattattaattaaaattacaatttaatttattgggtgagcaataattgtttgatattgttaggtatgactctatggggagttgaattggggttcttacaggtttggatattcgctaagctatttacgagttgagaaaatttaaaagttatttaatcacccgacttgtatagaaaatttagatactcttcctaaatgggttattattgcttttatatgatgatatttactaattttacttggataattacttgctaaatgttatagtaataacaattaatagtaaaatttgttcaaataataagatttgaattttttccatttttatctaggtctttctagttttaatattcttaggtttagctattaactttatcataaaaagccacagttttgtaaaaaactcatcaaataccctctataacactctatataccacttacagtcacctgtactaacataaaacaataaaattcctaataaataacccatccaaaccactataataaacctctataaaacaattacgtaatttcatagataaggaaaattacctttcctatgagaatacccataataataataaaaattattatttcaatgtttcatacttgaaataaatatctcttttctacaatatacatgtccaatgcaactaatcaatcatctgcaaatctttcagaggcagaggattatgccgattttacagtaacttcaattgttgatccaacttcctttgatccaaatatttcaccaaatagaaatcatctttatagagcaaaatctcaatcttcatttataatatctccacataggaaaagttcaataattttaccgaaaactggtgaaaagattcaaagaacttattccttttgggataaagataataaagaaaataataaattaccatctgaatcaactcccttgatatcaaatcctagtatagctatactaccatcgcaatcacctttattaaatgaattctttaattatttgaaatcattattcactacatcaatctttaaagcaggcaattgcttattttattgcttcattatttgtttattcaccaacctatttcaaatatgttaggttcatcagattcaaaacatttaacttgtacggttgtcgtttatttccatccttcaagaaatgtcggttcaatgttacaagccttaatgtttgtttcattttccttagttttcggtattggtatcagtttattaacttttaagttaatttcatttgttattgataacgaattattatttcattcaaccaatattaaatcaccatttgttatattgacaactttaattatttgttgtacttcattaggtttaatatcgttttggaaacatcgtgtatgtaaacaaacatttaatactgcttgttcattagctgctattttaattatttcttcagttattaaagtttattcaagattattagatacaaatgataattcatcagatattgaaattccatgggaaaaaattacaagtattataagttgtgttatttgtggttgtataatatcagttactatatgtttcacagtttggaaacaatgggcaaatgaaaaattaattaattcaataattgaaattaaaattttaataggagaaattttaaatgatttatcaaatattttcatttcaaatgattgtcaaataaatgatataaaatttcaaagattggaagtttctaaaaaattcaagttattgaaaagtaaattaagtaaattagattctttattagaggaaacaatgtttgaatgttttgtacttggtaatgagaaaaaatatacattacttaaacaattagttgattcagagaaaagattggttgctgatttaggtggtttacgtagagctgttgaatttaaatgggaaatgatcgaattagaggataaccatgagttatctgccaagaattcaccagaacctcgtgctaatagtaatgatgatgaaaatataatcttagatgattcaaatattgatatagattctgaaatcgtggaaagttcagaagaattaattgaattatttcttttccaccttgctcctagtacgaaatcttttgttttcacaatgaatgaaatattaaaagatcaaactttcaaaaatggtcaaatagatccaattgttatacaatatgttgaaagtttgaaaaaggcaagagaattatatgatgatcatcaaaggaaggcaattgatagtttatataaacaaactattttccaaaaaaaacataatgttgaagaaaagattaatcaagaagaagttgctgcaacatgtgctaattttgcgttttcagttactcaaatatcatcagaattagaaattttcattaatgctacaacatcattacttcattataatgaatcaccaacaaaatcattcaatttcctcaaaatttggaaaattaataaagaaaaaatattagataatgaaagaaatcaattaattgatattgatttacaaaatttgaaaaatgaaacttttagttataaaatttggaaattaacaaaattcacaagaggtgtagatttccaatttggttttcgtgttggattaggtgcttttatactttcttcattagcatttttagattcaactagacatattttcaatgaatggagaggtgagtgggcattagttacattttgtattataatgaataaatcattaggtggtacagcaatgacaattaaatggagatttattggtactttcttaggtgcttttatagcttatatgatttggacattattttatccacatgttatattaatggcaattttcggttttgttgtctcgatcccttgctttaatataattttaaattggaaatcaagtaatgcattttggtagattcattttacttacatataatttaacagtactttattcatatactatgtcaattaataatataccatttaatagtgatgatgattgggaaggtggtgaaaatccaattatttgggaaattgcatttcatcgttatttaggtgttacaacaggtgttatttgggcattattaattacattaacattattcccagtatctgcaagaggtagattaaagaatggattatcagttttatggttacgtatgggtataatttggaaaaggggtgcattgaaaaaatcattagatgaatataattacgatagattggaaggtttaagaggtattaatgaatgtcatattataatgaatgaattaagattattattaaagcaagcaccaatggaaattagattaaagggtccattcccaattgaaagttataataaattaatggatggtacagagggtatacttgatgcatttgaaaatattaattcaattgttgattttgatacatcattaaatccaatcgaatcaattgttttagacaatctattcaatgaaacaaatgaattacagaatagagttttcttaatattttatatgcttgcatctgcattgaaaattggtttaccaatggcaagtgatgaaacttcaactgaaattgcaatggataaattattaacaaaattatcagatgttagaagaactgtcgagtcaagaagggaaattggtcaaaatacaggtattgaaaatgctgattttgttttattttattcatattgtttagtaactaattcaattgtttatgaattaactaaaatgatgaaagaagttgttaatttatttggtaaattagatgaagagacattagagttaaaataagatttatctattttatataatactattatttacatgtaaattattcataatcaaggccaattacttcatggaaaattttctttgatggaatttttgctttcattcttgcacataatagatatgcaccacttaattttctatgtaatgaataagtttcctctggaggtggagttaatctttcatttaacattaatttaatatttgtacgaactctatcagtaattgtttgagattcaaaatcatataaaccatcattatttgactctctaaatggttcacctaaaaccattattgaatcaatatgagcttcagtcattgcatcagattctaaacctgttaaaaatcctaattcaattgaatattttttagcagcttcacgatcttccttaatagctgcacgtaaagtatttgtatatggaattgtaaatgatttatcaaattcacgacaagcaccaaaatctaagtaattcaattttatcagtttctgcattataaaggaaatttgcccaatttggatcagtttgcataaatctaaatttataaatttccattaaagttaatctcataatttcagctgaaattttatttttaatttcttgtgaccaatcaccttttgcaatttctatacctttcattctttgcattgttaaaacgtgttcatctgataaatcatgataaatttttggaacttcaaaagctggttcattttgtaacatttccttatatctaacaacattagttgcttctctaatataatcacattcccattttaattcaactcttgcatttgcgattgatttttccagaaacataccaggtggtaaaagttttgttgaagttaataaagttaaaatattatctaaatctgaatcaattgaatctgcaacaccaggatattgaactttaacaacaacttgatctaactcctttttagtaacagcggtatgaacttgaccaattgaagcagctgcaattggtatatcatcaaaactagcaaataatcttgatctccaattatcacctaattcaaatgaaattgttttctctaattgatcagcaggcatataatgagcattattttgaactcttaataaaattttttgaatatcaggtggtaaaattgaattatcttggaaagataacatttgaccaactttaagagcagctccacgcatttgagagaattttctagccattaattcaatattacgtggtgataataataaggatttcatttctggtactttaccagttttagcataatgagttgcactatctttcagaacgtgagcacccattgaagcagctaatgtaccataatgaaataatctacctaatcttgatgaaggtattggagcttgacttagtttaataccattttcatctttttctccaataactgtagcagtttttatatcattgttattattattattattattattattattattattattgtcattttctctatttaatcttcttgatgtatgtaactcacgtttttgcgtgcgattgggattttgattattatgacgagctttatttgatttatcctttgctaatttaaagatatcaatttcagattcaccattttcacctaaatgatgtgccaatggtttaatattatcagaattgaattccctcttagcagcatttgctcttgcttgttcagatacatttttagcttcattatataattgatcattacctctaattgattgtaaaatagtacaattttcagttacagcttccaatgactgtttgagaacctttgtggagccagcggcaacattgtaaagctggtagagggctctagaagacataattaccgatattccagtgataaaccacaatcatcctctacacacttaatcttcccttttaacggatgtcaaatattcatgtaataaacaagctgcgtcgatgcgactgtattattgatatatcatcatttcttatgtcaaataataattttttttcagttttttgattttcaaattttggaaaaaaaaatttttttttgtttcattgaataagttataagttgattatttacttttaggaaagattgaatttttctttaatttttctttgattttgtctttaggttttggcatttggactcttctttgatcactgaaacaagtctgtcaaacaccaatcatcatggatcaacaatttgttcaatcattggaaaatactttatcaatggtattattaccagataatgaagcaattaaacaagcaactcaacatttaaagaatgaattctttaataaaacagtttctttaccttcattaattcaaatcttacaaacttctcaaaatgatggtgttaaaaaattatctgcagttgaagctagaaaattagtctctaaatattgggatgaattagatgattcaattcaacaatcaattagagattcaattttaccatttgctttcacttatccaaaacaagatattagacattcaacttcaagattaattgctgatattgcttatattgatattgaaaataatcaatggtcaaaccttttaaattctttagtctctgctgcaactgattcaaataaacaaactagagaaactgcaacttttatcttatattgtatcttagaacaattacctttatcatgggctgatcatagtggttcattcttagaattatttgcaactactttacaagataatgaatccccagttgttcaaattaatacagttctttgtttagaagctttatcaagtgcaattgatgaagatgaaactttattaaaatctttagcagctcctttctcttcattgattccaagtatgttacaagttttgaaaaattcacttaattttgatgattcagataagactaaagaattattcactgcttttaactatatcattatgttagatatgcaattattaggtaataacttcctcaatattattcaatttatgattgaaacttcccttaataatgatgttgaacctcaaattagatgttttgctttaactaatttaactcaatgtgtctcatacagaaaatcaaagatttctcaagctcaattaggtcaacaattatcccaaactgctttacgtattgcaggtgaagaagatgatttagttgaagatcaattaaatactgaatccgaagaaaatgagaatgaagaagaagaaccaaatgctttagcaattagattattaaatatattagcttatgaattacctccaaatcaagttattcaacctgttttagaagctgcacctgctttattagcttcctcaaatcctttcgaaagaagagcaagtttattagcaatctcagcatgtgttgaaggtggtccagattatttaagtgttcaattaccaaaaattattcaaatgatttcagctggtttaaatgatcaatcaattattgttaaagctgcttcattaaaatgtttagctatcttaggtgaatcattaaaggatgcagttgctgaacattatgaagttttaatgcaaccaattattactatcattgattcaactgataagatcttagtttataaatatgcaacttatgctttagataccttaattgaatatatggcttcagatgcaattaaaaattatatcgaaccattaatgaacaaattattccatatgttagattctgctcaatcatcatcattaaaatcagcaattgtttcagcaattggttcagttgcttatgcatcaggtaaatacttcattccatatttccaaaattcaattcaattattagaaaaatttattgctaatatgaatgatattgaaggtatgtcagaagatgatattgaattacgtgctcaaacttttgaaaatatttcatcaatggcaagagctgttggtagtgatgctttcggtccttatgcagaacctttaatgaatgcatcatattcagcaattcaatctgataattctagattaagagaatcaggtttcgcatttatttcaaatatggctaaagtttatggtgaacaattttcttcattcttaccaaaaattatacctgaaattcaaaaatgtttagaacaagatgaattccaaatgaacatggatgatgatgcagaagaagatgcattagctgaaaacttaaattttgcttcaggtattgcaactgaaaaggaagttgcattagttgcattgggtgatttagcagttggtactaaagaagcttttgcaccatttgttgaatcaacttttactattttaattcaacaaatttctgaatcattctcaattggtgcaagttgtatttcaattttatggaaaattactaaatcaatgtatgatgttttcggtaatactgaaactgtttcaaccttaattcaaaatgttagagaaaatactgcagaattaatgattgatgaagttgatgttaatgttattattacatgtcttgattcattctatgaatatgcaaaatcaatgggtaaaattgcagttattgatgaaaaagattcaaaatctttaacaactttattagaacaaactactttaattttacgtaattcacatccatgtcaagaaaaggatgaagatatgccagaagatgaagataccaacgaaactgatgcaattgtctatgattcagcactggaagttttaatttcattatcaactgcaattaatgcagaattcccaacaatttttgcagaatataaagatttaatttacactcaaattaattcaaaatctaagaataagcgtgtttcaactttaggttgtttagctgaaattactaatggtatgaaaaataataatccatattcccaagaattattagaaatatttgttaataaattaacaaatgataaatcaagtgaagttcgtggtaatgcagcttatggtgttggtattgcaattgaatttgcaaattttgatgcgtcatctgcttatccaactattttagcatcattatccaaattattaaataaagctgataaagaagcattaaagaatgaagatggtgatgatgaaactgttgaaacaattaatagaacatttgcaaatgcatgtggttgtgttgcacgtatgacattaaaacatgaaaatgcagttccagttgatgcaattttaccagcattatttgaacatttaccattagaaactggttttgaagaaaatacaccaatttttgaattaattattaaattatcaacaaatgaaaatgcatggatgaatgcaaatattccattaattgttaattattttgaaggtgtatttattaaagaagctgaaaaggataaattaattgctgaaagtacacttggtagagaagaaaatattgaaagattaaatcaattcgcaactgatgaacttaaagccaaagttattgaatatttaaaatggttaaatactaaatctaatggtgcagttgcagctaatgcaactttaagttcagtcattgcttaaatgctaacttctcatcttgtcactataataatttaatttaatttaattaaataaaaataaaataataataaatttgcattttttaaatcctttcatgttttagaaatgtaactaaacatgtctacgttttactttaactctttactttttactactctcctttttataaacatttttaaaaataaaaatccgattttgattccacttacaatattttgatctaacttgaattgatttaatgtttagtttcgtcttttttttatatacagaaaaattttaaataattataaaaataacagatattcttatttctttgatcttgaatcagtgatagtgtttaataataatgcttcattatctaagtaaactctatttggagattttgacagaatttcagcaatatctttagcagtttctaatctctttaattcaacataatcttttgatcttttaattgcatcaccaattaattcagcagatttcgcttcaccttgagctttaacgaccatatattgtttttcttgaattgctttatcaacaacgaatgaagctctttgagcatcttgttgagaaatttgctttgcttcaacggcagttgaaaattctggtgagaaagtcattgcagttaatgagacatcatctaataaaaggttaaaataagcagctcttttaactaaattttctctaacaagtcttgaaactttttctctttgagtaattaattgaattgcattaaattgtgcaacgacagcttttaaaacttcattaataattgaaggtaaaactctttcatcataatctttacctaaagttctatgaattgttggtaaagaattaacatcaggtcttgataaaactctacaagagatattaaccatttgtaaatcttttgtaccagttaatgaagcaacagttcttggttttgctctaatatcataaactgttgggaattgtaagaaaggaattttaatatgagtaccttcaccgacaacttgaggtaaaacaccacttaatctatcatatataacagctctttcaccaccattaacattatataatgaactttgagcaaccataagtgcaccaccaagtaataataaacctccaacaccgaataatgcaccttttggagcacctgagcctgtaggtggtttaaatccattacgacctctaccggtagatgattttgaaatttgttctgctctcttttgcaaatctcttgcaaagttttgccagtcgttgttattcattgtgttgttcagtttacaataacagtttaaacaaaaagtagataagtcttgtatataagttgtaagtcaactaattaataaaatactgtttctcgcagtaagtaaaaaaaattgaaatttgccactgttaattttcacagtggttagcactgggctcagctgtctatctttatagtggtatataagacttattattattcttattaatatacaatgtctatagatccatcagatatacagagagccgtttgtggtggcaatattggtattgtcaagaagttgttatcagaggatccaaatttatacaatactaaagattcagatggtagaactccattacattgggcagtttcatttcaaaattttgatatagttaaagtattacttaatccctatgatgaatgtgttgattataagggtaaaaagaatgaaattgaattagatgaaattttagatgattcaaattggaatccattacatattgcagcatctgcaggtaattttcaaatttttaaattattagcaactcatataccattacctgatattaatttacaaacatcaacaggtcaaacatgtttacattatgcagttagtaaaaataattttgatattgttgaatttttgataattaatttaaaggcaaatgttagaatcaaggataagaaaaatcaattaccaattcatagagctgcagctattggtagtgaaaaaatggttcaaatattagttgaaaatggtaaatcaccattagattttactgatatttttggtatgacagcaattcatcatgcattagctgaaggtaatgcagatgttgctattcaattggttaaatatggtgctgattggagaaaagaaacaagttcaggtgaatctacttttgatactgcattgaatgaaaatgtacgttcctttttcaagaggggacttgtagaagctggtgaattagatgaacagtaaagttgtttcactaaatcccgggatgttttagtatgtaaatctaataataatatcattttgatatttgaaataacagtttataacgaattaatgacatgcaatcaatctaaaattagcataaaaggaataaagtaagtgttcggaaatgttcttttacctaatgtatttgtttcataacctatcccctctaatcgataagtatactatgtactatcaaagtttaaactctaatttgagtgcatgtccttcaaaacctttcccaggttggtacattcgctagccacactttatacttgtataacatagcccgaatggaatagtataaatatagatgaattccccatgatatttctacaactcttctcctcaatctattatatttcttttcttttaccaggaacaatcgatccaaaacaaaaaacaaactaaaacaaactaattaattaaaaatgtctgacgaaggtagaaagaatttcactgataaagttgcagaatctgttaaaccagaaggtgacaaatcattatgggacaagaccactgaagcagttactgatgcttacgataaggttgcagcttcattacaaccagaagaagataaatcattatcccaaaaagttggtgacaagttatctgacactccatctaacccagcaaagaagttttaattgatttaaaacaatgttatttttatttatcttacggaaatgttatgtctatgaagttatatactatataatatattgtataaacaattaaaattaaaattattatcttaaactattctataaagcagtagctgtatagtaatacagagaagtatacaaaagttgagccccctttttatgtctcggagataatgcgtcacgtgacatgttcggatttaaaaaaaataaaattttgaaaattgaaaattgaaaaacttctagaataatctcctcaaaaaaaaaaattaaatttttcacttggaacatgaattattaatcatcgattttaacttatttaaccataaaaccatccacttcttcttaattttgaaaagagaatgcaaaataacgaaagtgatcatatcgataaaaagcaaaaaattatgtcacaacaagaagaacaaaataatcaacagcaacaaactcaagaagagttttttaaaccagtcggtgaacttgcaactgaagcagataatgaatcaaataatgatcaagaagttgatgatcaaggtttaaggaaaacaggtgcagaagatgctcaaggtcatccagttcaagaaattgattcattatgtatgagatgtggtaaagatggtgttacaagattattacttacatcaattccattttttaaacaaattgttttaatgtcatttgaatgtccacattgtcattttaaaaatagtgaaattcaaccagcttcagaaattcaagaaaaaggttcaaaatatatgttaaaaattgaaaattcagaagattttaatagacaagttgttaaatcagattcttgtacttgtaaatttgttgaattagatattgaaattcctcaacaaagaggtcaattaattacacctgaaggtttattaactgaaatgattgataatttaaaaattgaacaacctcaaagaaaatctttacaacctgaaacttatgaaaaaattgaagaatttattgaaaaagttcagaaatatattaattgtgaagaaggtactttacctttaacgttaattgttgatgatcctgcaggtaattcttggattgaatatgttcctggtgaacctcaacataaatggagttgtacatattatgcaagatcacctgctcaaaatgttcaattaggtttaatctcagcagatgaagttgctcaacgtgaaagagaaatttcaagaattaaaggtgaagaagctaaaaaattagttgaacttcaacatcaacaaactgctgaaaatttagaaaataataatccaagatcaactggtataataagtgataaatctgaaattgaaaattttacaaatgaagttgaaacttttagagcaacttgttcaggttgttatgcaccttgtgaaactcatatgaaattagttaatataccacattttaaagatgttgtcattatgtcaacagtttgtgataattgtggttataaatcaaatgaagttaaaactggtggtgaaattcctgatcatggtacaaaaattcaacttttatgtgatgatccagaagatttagctcgtgatattttaaaatctgaaacttgtggtatgtcaatacctgaattaaatttagatttaactcctggtactttaggtggtcgttttacaacaattgaaggtttattaagacaagttagagatgaattacattcaagagtttatactcaaacatcagattcaatggctcctgaaactaaaaatagatggaatgtattctttgataatttagataaagcaattgatggtaaaactaaatttacaattcatatgattgatccattatcttcatcttatattcaaaatgtttatgcacctgatgctgatccaaatatgacaattgaacattacccaagaactgaacaagaaaatgaagatcttggtttaactgatatgaaaactgaaaattattaataattttatcgtgtattttattggttattataaggttttagggtttatttagattttaatattcttttttttttatataatgtttctaaatgtgtaaattatattataaatgtttccttttgataaagtcatcatcaccgtcttcttcattatcgtaattataaacagcttccttaacttgatgcccctttttcttttctttatcggaatcatcatcctcatcatcatcatcttcaaccactattctatgttcagtctcattcagtaaactatttctctttctagtttcataaacatcactaaatggatttctactactctgtgacataactctgtacaaattattattgaaaaatggattattatcaagcattataccttcttcgtcattattattattgaaattttctagtaacttatccattgatatatctgcacctttcaagctgtttctgaacttttgttttatcttttccctttcaacggcattaggcgcatttttgatttgattgaatatatcacatttctcgacaaagtatttatatcttaatcttgtaaatgtggttttaatacttgccaaaaccttggtttttctaatttctctattaatttccctaatcttagttgaatgttttaagaaatcttctaaattcaaacatgtactatcatcaaatcttgaataataaccaataatcaaaatagcatccttgaatggaatttttctaacaggagcagcatcactaaatttcagaacagttgcagcttgcagaagttcaaaaatcatcttatcatatcttcttcttcttttacgaatttccgcaaaattgattaatgataagatatcattcagtttctctaaatcgattttaaaatcatatccattataatcattaaatttgaataacacttcattggaaatcttttgtaaacttaaaccacttggataaacatgatatgataaaacaccatctaatgaatgcaaaaatttgaataaatcattttcataaataaaacctgatcctgtgatatctaattcattccatgcctttttaaattttctaatttcatctctagtgattaatttatgtggtcctgatccatgataaacataactgaaattgttaataacaacagaaatcaaaatattcaagaagatgtacattgacaaaatattccaaacaaagaataaaaacattgctaatgcacgatttccacaatcactattaccaaatccacctgcaaaacaatcaggacttccaatcataaagtctcttgcaatataattccaaccttcaccaaaactgtttctgaataacataatcattgcttttgtaacagttcttgcatttaaattacctgtagtattaggtccaagtttagtcataccaaacaattggtttaatgcaatggcaaaaaccaaaaataaaaccaaccatgtatacagtaaggtcatcaatgaaaataaactagcagaaccatatttaatcaattgatttaatgcatcactttgaggtataatcaaaatcaaaacagaaaccaggaagaccttataaatattgtaataaatattttgcagtgtatatttcaatgaaatgcacgacattataactgaagaaattaagataatcgtagttgcaatattaaacttatttgagtaataaactttgaaccctaaacaatattgaaccaaagatgaatgaactaataaagtaaaacttgtcactaaatacaaaacatttctaatcattaacccattacgtaaatcaggatagctttcagaaagtagaatcgcaaaatgacacaaaagaacaacattcatacactttgcccatttacctctctttgcagtaacaatcttggataatttaatttgaaaatcactcattttaccatcatctcttcttcttgatggtctaactttactcaatacttttttaatttcataccaaccatattgttcattattcaaaaaagccgtacctgtttgtaaggtataattattaataataatagcaataaacaaattgataataaagattgtagcacaaaaaatgaaaatgataacgaaaataccatttcctggagattgaaatgtatgtggttgttcaccataatcaccaatattcatcacatcacctaataaatcgacccaaccttccagtgacaaaatttcgaataatgtttgagctgaatcaccaaaatcatcaaattgaagataaggtgtatcaatataatttgggcttaaaatattccagttaaaaacttcattttcgtattctaaaacacattcacctaaggcggattcaccgtcaatacaatgagataattcattactgaagatattcaatccccataatgcaaaaggtaatagtaaagatagagaaacgaatgcctgctgaaaagattttgaaaaatgctgaaacaactgcaaaatgaaagaccatttgagattcgttagtaatggttaataaacggaaggctcttaagtgcctttaacgcaccaaatgtgataactgatgaataattattattaatagttgatgaaacagtaatccaaaaagatgtcaacacaataaaatcaagtgaattccaaacacttttgaaataacttctttcaccgaaaacccacccatcagcaataattttaatgacaaactcaatagtaaaaatgaccatgaaaacaatatcaggaacaatcatccagttattttgtaaatcatcaaatgagttgacttttctatataacggtgtttcgtaacatgcaagaacaacaacaacaacaggaaggcctaaaaacatgaaaacattaaaaaaatataataatttaggtgatggttgtttaccttctatacgtggtttaactggtgttgtgagtaattgacaaaatttacggattgaattattattggtgaaaatgaataatgaccgatcaacattttgatcagatttaatccattctttaaatttccttaatactggtttcctactattcaaattctgaagttctctatctatatcatcttgacgatcttcatctaatacctcatttatattgtcaaatgggtgtaacggtatcaactcaaccagatgagtattgtcaattaattccttgggaatgggtctacctaatagtttcaaatataataatttgaattcatttttagtagattttaagaacgtaaccaaatcattaatatataaagcctctcttactctatatctgaaaagtttaatttttttgaaaatttcctatcgctgtttctctcattgatatagtcattgatatttattttatcatatccattcattactaaattttcattcaacttatttaagaagaacattgcttgttgagattcaacatttctatcaaaattattcttcattaaatcaaataacccgtcagtattgttattattctgaattttatcaatacatgatctaacaaattgttttatttgatttaattttttttcagtttcagggtaattccaaactacctgtaataatagcaatgaaaatacccattaaaacagtattagagaggatgaaccaaaaaatcaatgctgttgcaatacagactgtattaaatgtagatgttgaatatgcttcaactgtatataaaatgtcagaccaattctcagtagttgtaataatgaataatgaaacaattgtgttaggtaaattatacataatccatggattatctgacatttcatcaacaggaacaacaccttccaccaatcttgcaagtatgatactaacaagatataataaaatcataccaaatacaacaagctgcataaaaggatttgaattttttcaaagctaacatccaagcatttctcaatggtttaataaaatgaataactctataaaatctcagtataccaaaaattgaaagccaaccattgttgactgatgataatgatttataaacgggtggtaatgacagtacaaactgagaagatagcaatggataagtcagtcaagttgaaaattgagtaaaagaatacccgtggattcttttcaataataaaaaatgtaaacctgaaaacaatttccaacattaataatgaggagacaattagatctgcagtataataagagctgtttaaaacaccattttgtcgagttttagtacaactataacaaaaccaaacaatgatgagggtaacctggtataatttcaaacttgatctaaatgttttaaatacttggaattactgacaaaatcttcatattttgttttatatttattcaaaaggactattttttttggattgtagattttccctataagaatgaataataactgcaataaataaattaagtaaccagacaacctaaaataaatattgaaataatgtaaaacaaagcagctgccattgaatcgctatccattgtataatacatcaaatctgtgaaagtatttgctgaaataataacaaaaacggattgcattgattgaacaatattatcaaacgaaactctaccattatgaggattttctccagaaatacattttgaattaactggacaagtataacctttagtagtaaatgaggattcaccatttggtaatagataaggcattgggtttttattttcatctaaccaagaaccacaaaattgaaattcgtgtagaaaagtatctgttgaattatttggattttcccaaacacaatgacgtctgaaagaagatttaaacgattcaacaccaataattgataataatatccaaaagcaaattaagaaaatccaaatatcctttgattgataagcagcatttttaagacttgctaaaattcttcttgaaaatgatgacaatgataaaatgtgtaatatacgtaaacacattaaagatctgaaaatttgagctttagctgaatctgcaaatttgaatgctataaagaaagatacccaaaatgagattattgaaacaaaatctaatctattccaatcggttcgtaagtaaggtggtattaaataatgagaaagtttatgcttccttctgttaggtatcatatttaatattgagttttttaaagtacttggttctgaatttgtgtcattgtttgaattaatgaatggaatatttggaataatgacagaagttacatcaattgaatcacttgaatctgagaaataatcatcaataatatcaatattaggatcaatatttgatgatttatctgataattcatctaataaatcatcaggaatatctttaggaaattgaaataaaccataagcaactattttcatgaacatttcaactgtataaataatataaaatacaactaaaatccaatctacccaattataacctttagcaaaaacgtaaccgttttcgaatttccaatgttgataagataataaacctatttgaataagtaaaagaattgttaagaatatatgggtatatttaaatgataaaattttatgacaaaatagtcttaattttgactttggagagaaaaatttaagagttttccctaacaataatttattcttatcaaattgaggttgatttgaggatggagaggtataggggctatcagtgtttaatgatgaagatgatatattttgattgttaaaattattattattatatgtcgtattattagaggtattatttgaatcatttggccttaataggagtgatacagcatcaggatttgataacgaagtatttgaaaattcagctgataaattatttgaaattgaagcagcatttgaactatgattatcatcatttgttggcatccatagagataaatcatcatgaaaatcgtcgtcatcataattatcatcatcagtactatttaaattagtactaatactattattattattattattattactattattattattattattgatatttaaagcatcattactactattattactaaatgaggatgaaatatttgaaacgttactgttattacgactccttaaagagatcgaaccacttcgatctgttggagctgtaagtaatattcgaggaggtatatccatagtatgttatgttgtgttaaatgctatataatcattgcaaagaaaagagtaaaagaagaagaagggtatgttaaattataaaaaagggggagagaggaggcgttttcccattaatgaatgagttaagaagctgagccagttgacccattagaatctgttgaaattgctgagcctgcagagtcgcgtcggtagtatctccagggggtatttgttaaattgggggtggtcctctccttcagtgggtcataggaagagttgtattctttctcatatggaccatgggatgatgagtacataggtttagaatatgatgatccagtgtttgcaccgtataatgcattattgtgtgttttcttgcggtctcgagctaaccaacgatcaagaaatgatgacattgttgttaagtattttgttattgattgttttgttaagtatagtaaaaaaagtagtaatagttagttatatttacaagggtctctctgtatatttatacgtgttaagataagataagatagataaggggaagcattaaatcatcatcatcaccagccagtcccttaccacacatttatagtagttatattatactcacactactgtttcccctccttaagtctctcttgtttctctctaataaaggcgtcacgcacttcatcaacatatttatgatctttgtgacgttgaacacattctctcattgcatcaccttgtttcttacatttaaataaaactccaaaacctgtatttgcttcacatttcttaaattcacgtacgtatggatcacatgcttcccaaactgcaatttgaaatctttcaataacttttttctcctctgcaggtgttaaaacccatgatggaagtccgttaattctctcctttggattactatcatctaaccaccccatatcttattgtattgtattgaattatgctgtgtatataatatataaactaaatgaaataaaaatggtgtcattagtattaacagtagtataaatttcagtttctattacataataaaatcattttttttcttttcctcctcttatataagtaaataaacaccctttatttacatcaaattagagaagtgactacattcccgttaagcaatgtcatccatagctgaaactgcatctttattagatcttaatgatctatcctatattgatgcaatatctcaaagaattttacgtttacaggcacttcacaatgattctttaacttcattacaattatcaattgattcacttactagacaaaatgaaaatattgcagcttcaattaaatcaattacttcaagtcaacaaacaaagcaaactcgtcatgatctgaaaaaacttgaaaatcaaatctttaatacagctcgttcaataacttcacttaatatgcaaattaattcattaaaattatcttataatgataatttgaaaaggcttaattcacttcattcaacaatttcacaatttcaaacacctcaaaattcaaataccccaaataatttaatttataaattatttaatgctacaggtgtaagaattgttaatgatgaagttgtaatacttaataaacaatcaaataaaataagtactctttcattagatgatagttatagtgattatttcgtttcaaattttatatgggatgctatataacaagattttatttatttaaatgatgtatttttattatgtttgtatttataaataaaactaatagttttcaggattttcacgtaatgataatttagtccattttggtacaaaatgtgcaccttttctatatcctcttgaatgtttattaaaaactgtatatttatcccttggtaacatttcattttcctttgggaaatttaattgtaaattagtaatttttttactattcataccattttcttgtaatccttcaaataatactctaatattttcatcaactgtttgcatacgatgtctttgtcttctcttttgtggtgctgataatctccatggtttcttccataataaaccagatagcacactgcatgtactcttaaatgctccaatcattcttaccctgaactataaaagaaaaagagatgtattgattttccaacagctgtataattaatgcatgcaattatgaaaattcaactatgctcaaaaaatttctttcaattcatgaaatttccctcactcaatataaccatcaatccattctactggactacacttcttttaaccaaccacacatataatgaatgagaaaacctttcacagcacttgttgaatcattagactcacaatccccacttcctcaattacatcctcaacctagaataatcataaatggtcaaccatttggttctcaagcagattttattcaattatggaattctttacctaattcaaatcatcaaataacttcatatgatactcatcaaatacctggaacttcaactcatgtagtattggctcatttaaaggtaagatttgatgaatctggtaaggatagatcaggtcaatgtacttcattaaatactcctgcctcatcaattagatcaatttggagtcattggtttggtattgatttatcttgtgttgttgaagaacaaaacggtcaaatattggtaaatacttggaattatagatttgctgaaaatccttcatccactatctataaagtcatatagtttgactttttatgcatctttttactattgttttattaatattatatcaatacatgtttcagtttacttcttttttgaacactttttttcatttttggaccttttttttctttcttttttggactttttttttcttttcttattaaaccctaatctctctatatttcctttctatagatttctatataattattttaattatccatggtttactaattacacatacaatcaataaaatcaaaacagtaagttgactgacgatattgaatatttctaaaatcattcctttagaaataactttaattccattaattatgttcaattgattttcttcaatcaatttcttaatagtaataatataaccaatttcatagataacaccactaattttcagaagtaaatttactaatattaaaaatccaatcattttaattataatattgattatagtaattgaaattgaaaacttatcactctcttcttcacggtatttcttatcaaataaatattctttaaataaattcaattttttgttacattcatccttgaaataaattgtaatgattatactcattaataaacacgtactttcaattacaattccaataatagatttaattgaattcatttcaccgagtaataaacttaaatatccatacattaaatacttattgtctccagtatgtaggtttttaatcataacttgatatttatcaacaaataaattcgaaatatattcagcatctccttcaatttccatagaacttaatgtgtaaattaaatcttttaaaataataccaactaaatcagtacctttacccttagatatcaaatgacattcactaaaggttgaaacaccattaaacatttctttacaatatccgaaattactaattttgaaaatagtgtcattcttattattaaaaatattatcaatactctgtttaatcaaatctttattgaatgatgaatctaaaattaatcctgataaaccatttatgattgtttcaaatatgtcactaacttctgaactgattatattactacctttaccaactttttgcatttgaaaaatgttaaaacctgtaatataattttcctttccagaagtttgaatttcaaattttggtaaacataaaccttctttggaaatacatgacatttcacatataagacttataataggacaagcaaataaaatcaatgtgattaaacttaaaattttgaaacttttgaaatatgatttcattataatttgttttcgtgcaataattaatctttctgtgctaacgctcgttaaagggttatatttttccttattataaagatcattctcactgctaaaacaagtgcttgatcctgagtttttttcaataacagtacgataatttgctgatccacctgcaaagccaggtctgattgcatttttattaaatgttacaggattattcgttttaaacatattgtctgatccttttatgaaagggtttctaattccattaaaaatattattattattatcaccaccactgttttgtttattagctatttgaatgggtatctttactattcattgaatcaggatctttaaaatattctggcccatcaaattccaattctccataatcttgatattcttgataatctccatagtcgccactgttaggtgatgtactaggagcaaacataacagcaaagatctatttgatcagatgaatgaatccgatgtattgttatcaatggtatagcaaatagggatgttttcttttttatagatttttgccccatgaaaataaaaatttcggaaaatttaagggggctcagtccagttaaatctctctttcagggcgttcctctgtctaatcttatgctgggactcctttgtgtggtgttactgaacttaccatcttcctctccgggaggcattatgggggttagtgggataaattcttcactttgtgaaagatcaatgttcaaagcagtcggtgcttttcttttattaaacagttggtctgatcttaaaaatgtaatgtttttaacgattggttgtttaacagacacgtcggtctctgataatgaatgtctatgttctaaagggttggtgatggaagttattgttgattttgtatcttcaaaaatgggtatctcaaatgtacgtgtttgatttctatttttatatatatcactttcaaggtcataatcttcactgtagtctacatcttcatcatctacttcatcctcttcatcgtcatctttattcaatgcactttcatctgcatatctataatcaaattcatatgcatttaatggcagtggaatttgattgtttttgattttcttatcattagttgatctgctaaaccaaacgggacccgcccatagacagaaaagaataattgtgaaacataaccaagtaactgaaatagaaataaatactttaccaaatgtcatattaattccgtaactacctaattgactactaacactactttgtattttagaaagttgaactactaaaattgcaaatgaaaaaattgaaagtaccaaatcagaaaatgttaaaactgccatataatttttagtccataatgaaatattcgaatcatccatttcattacctctcattccataataaaaaaatgtcgatataaataaaagtatttgaattgctattgttgttatcaataagtttacacctgtgttggctagattatcggttgaatctaaataatttgaataattaggatcacttgtgaatctcatagtagcatcatcaacagttgtatccacaacttgactataggcatatgataaaataatattaaatccaatagatgccaattgctgtcgataattgaataaaccaaatttattccctgtacaagtcattgttttattttgcatatcaatctgatcatttatctttaaatcattaatataatctggatcatcactatcaaatgtaaatggaggatgatagtatttaacataacaccaatcatttaacccagttctgatttgttcgggtgtatcttcaatatgatcttcaatataattagttatcagtttcaactctgacgttgtcataaaattatttgattgatctgacagttgctttaatgctgtaaataaaccttgagctaaatctgattgtttagtatttaaaacatataatggtatatgatttgctttagatccaagtaatgtacttcctagaattaatgttaataataaaatgacaattcttaataaaaatataactgtagctcttttactcaaattaacaaacggtagttgaccgtagaattttgcatttgtccacagaatcatatctgttagttaaattccaggactgtacttgtctataacgttgcttttatgctttacgaaaaggccaagcaaaaagcaatgatgataaagagcttcgtttaaaaaaaaattagataatcacgaaaaaatataaattcctactcaaatcattattatcaccatccctttcaaccttcaagagaggttgttgatatggtaacaaccatttgtttatcattgaatgtgatattctaatttttagttatggtaataacttatagtaaatagaataatgtattatatagtgtacataaatcaaatattaatacacattatccattattattacatgctaagccatagattgtaaagcttaggaataaaatttcatgtaatcgcattttgaagattaagttgatctcttcaagagaaaagtttcatttgcaaaaaggagtaaatggcaacaactcagaaagatatagttggatgggaactagtctttgatggtaaagcaggacgaagacgtagtcgtaaatcggatattcatattaaaagaaatagtgacggaattgaaataaaggaaggtgattgtatttcattgaaacacgaaaatagtaaatttacagtatttgcattagttaaagatattatacttgcagttgataagtttttagaaattaaagtattgctatttgttcaatataatgaaactttggacagttatataaagcagaagtcaattgatgaaaaatatacttcaaaagacttatttcttacgccatttatggaatcaattaaaatcgttaatatagttgataaaatcaatgttataggtatacgaaatataaagatgaattgaatgataatacatttatttgcagaagaatgtgtgatgaatcaaacacacatttcacagatataattgattgggaaactatactagaaaatttcaactctaataaaaatgaattttttgaaactgtcaaattactgacattaaatacatcagccaattcggctcattcaagtccttctaagaaaattaaacagacagctaaaattgaaaaaataaaacaaattggtatcatatatgatgaaaagttaataaaagaaaaacctataaagaaaagtcttcgagatcgtattacttatattgacgatcatgatgatgattctgtagaagatgaggatttcagtgataatgaacaagatgaggatgatgatgatgatgataataataattcaagttcgaatgatgaagaattaagttctgttgatgatgcatctgacgatgaattttatggtgatcaaacaacaacgagtccgacaagaagaaagagaaagaaatctactaaaactaataaaaaatataaaaaatcacgtaaacaatcagatgatgaaatggatgatgatattgattataatgcttatattgaacaagaaaattttgaaatgattaaaggtataaaacaagatgatgaaaaatattcaactaccaagatgttaatgatggctaagaaagttttaggtacaggtactaaattgaaaacacttccttgtagggaggaagagttttatgaattatataataatttagaaggatgtattaaatctgaaaagggtagatgtatttatgtcagtggtacccccggtgttggtaaaactgcgactgttagaaatgttattgaacaattatctgctaagttgactgttgaaaataaaggcaaaaaagttttcaattatcttgaaattaatggattaaagttagttagaccacagcaagcatatcaagttttatggaagaaaatatctaaaactgcaacttcagctaacaattcgttaacatatttacaacaatattttgaacaagatgaagagaatgaagaatttgataaaaaaaaggataataagagcagattaccattagttgttttattagatgaattagatcaaattgtcacaaagagtcagtctattatgtataatttttttaattggccaacatatgaatattctaaattaattataatagcagttgcaaatacaatggatttacctgaaagattattaacaaataaaatttcaagtagattgggtttatctagaattcaatttacaagttattcatataatcaattaagtgaaattattaaaaatagattagaaacattaactacacataataatcatttattaattgctaaggatgcaattgaatttgcatcaagaaaagttgcatcagttagtggtgatgcaagaagatcattaatgatttgtattcgagctattgaatttgcacaaaaggaatttaaacagaaaagtgcagctgaaaagagagaattagatggcaaatatactgtcactattatgcatattatgaaagctattaatgaaacctctaattcacctgtatcatcatatttggtttctttaccattcattaataaattcttgcttatttgtttgatgttaagaaagaaacgttcaggagttgctgagattaaagtaggtgaaatttttgatgaattaagaacacaggcacatacattatcatttagagaaatcaaggaaaaactgaaagctgataatttaacattatttgatatcctatttgaagataaagatgaaagaatcatcaagaatagttcttatattttaagaaattttgaagatagtggtatattatttatgcaacatttaagaaatgaggaagagagaattgttcgtcttaatataagtgatgatgaaattatcagttgtttcaaaagagatgataatttaaaggaactcattgcctatgtatagttatcccttctgataatcatatatcttggtataatagaattggttcaccagtatttgtaatttctggtatttttaaacgtaaatcaaaagctttacttataactattttaaatattttttgaatattaattgaagcagaagttgaactaaatattaaaggagcattcatagctgaagcgtattttttagcttgtttagtaatttgatcttgttcctcaattggtaattcgatgaaaacatcatatttagtaccaactaagaaaggtattgcagttctattaaaaccacgagtttgtctataccaatctttaattgaatttaaagttgattttcttgataaatcaaacataaataaaattgcaactgcatcagttgcaacaagtggtaacatatttgtaaattcactttcaccgcctaaatcccaaattgagaatgtaatttcagtatttttaatattaattgtcctttccataaaattaacacctaaagtttgagtataaacttcatcaaagcaattttcaacatatttaaccattaatgaagttttaccaacctgagcatcaccaattagtccaacctttagtgtgatattatttttatttctatgagaggaatgatcttgttcatccattgttgtttataatcgatatataagattaaacccaatctattcaaccgtgaaatgatatcattaaattcatgttgctgtagcgtgtttctaaattttgaaaagtaaacaaacgtaatattacgtaatgtttgtatcacgtgacaatcttttctaaaaatactattagaggtctaaggagtaactacgtaccttcccaattaggaaatgcagcgaaagaatcgcacacaagaaattttctctccctctcataatgaaacaattttttcacagtcacaaaaaaaatgagtgggcgagaaatctggtaatttacagtggtgaaaattcaattttttttcctactatgggagagaggaatgctatactggtgatatagtgggttttctctaattttcttactatacattttttttttcaggaattatactagtattatttcttaattgcagttataatttttttgtaatattttgttacttacatttttactttaatttcattttaatatccacaaccccatcatggcaatcggtaagaacaagagattatccaaaggtaagaaaggtcttaagaagagagttgttgacccattcaccaagaaagaatggtatgatattaaagcaccaactacttttgaacacagagatgttggtaaaactttaattaataaatcaactggtttaaagaatgccgttgatggtttaaagggtagagttttcgaatttaacttagctgatttacaaggttcagaagatcatgcttataagaaagttaaattaagagttgatgaagttcaaggtaagaatttattaactaacttccatggtatggatttcactactgataaattaaagtcattagttagaaaatggcaatcacttgttgaagcaaatgttaccgttaaaactgctgatgattacgttttaagaattttctgtattgctttcactagaagacaagcaaatcaaattaagaaaactgcttatgcacaatcttctaaattaagagaagttagaaagaagatgattgaaattatgactaaggaagtttcaaactctactttagctcaattaactggtaaattaatcccagaagctattggtaatgaaattgaaaaggaaactcactcaattttaccattacaaaatgttcatattagaaaagttaaattattaaaacaaccaaaattcgatttaggtaacttattatctttacacggtgaatcatctgttgattctaaaggtaaaaaagtttcaactggtttcaaagatgttatcttagaaactgtttaaatttaatttaatttttaaagtttttaattacttctatatcttactatataaaacaaccatctaacaaataatttgtttctgttatattactctattatttattattacgaaaattattatattatatactgtatctttatctagcaatatttccattcatcttgtagatcataataggaggtttctaaattgaaaaattttacagtgagaatctgaaaaaattattacccgtaacaattaaattatacttgacaaaagatttgaatattaaaagattatatcagaaatacaaaatattgattacttatttaatagagaaaatacaaatttaactatagatgtgatgaatttaagactttacttaattgtgcagtctcttttcataagagtataagttatgaacaccaccttcaaattgagctgaaggagttctaaattcaaatctaacttcaccattcataacggattctcttaatgcatcaacagatgtaacaccaatatcttgacatgaatgttgtaaaccattataaatatatggaataaatttagtaattgaacctttatctaaaactgaacctgaaacaccttgagcaactaaaactttatcaccttcactgaaatatcttgaagttgaagcatttgcatttgtatcagttttttgcattgcatcaattgaacccatacctctataagtttttaatcttttaccatctctaaagaaataatcaccaggagattcagttgtacctgctaacataccacccatcataacacatgatgcacctaatgctaatgctttagtaatatgaccaatattttgaataccaccatctgcaatacatggaacaccaaattgatttgcaaattcagtaacattataaactgctgtaccttgaggtctaccacatgccataacttcttgtgtaatacaaattgaacctgaacccataccaattcttaaaccatctgcacctgcattaattaattcagctgcttgttctcttgtaacaacattacctgcaataacttgtaattctgggaaagtttctttaataaatttaatcatatttaattggaaaactgaattaccttgagatgaatctaagacaacaacatctaaacctgcttcaactaataatcttaatctttccttatcttcttcaatagtaccaattgctgcaccacataataattgtttagtaattggagattttgaagcatgaggataatcttgatttttttgtaaatcagttcttgataataaagaaactaaattacctgctttatcaacaattggtaatttaccttttttagaatttcttaagatgtcattaccttcagataatgaaacaccaacttgtgcagtaactaaatctttagtcataacatctgcaacagttaaggttaaatcatcaaggaattgaacatctcttgaagtaataataccaactaatttaccaccaattaaaccagtttctataataataaaaagtaaagagtggagatgaaatgttagtaaaaatgttctcaattgaagattaaaatattgatgttcccaaattttgaatgaagaaaaaaaggagaaatagagaaagaagtagtcagagaattaaatttttttccacaagatcgtttgatcgcaatcggtagaacgaaagttataaattttgttaatcatcatgtaaaaattcttctttctttttcttcaaaattgataagggaaattaacacatttgaaatggaaataaaacataccagtaacagggaatgaagtaaaacctaagttttcactcattttctttgcttcagcaattgtagttgaaggagagataacaacaggatcattaatgaaaccattttcatattttttaacttttttaaccattgcagcttgttcttcaccggtacaattatgatgaataataccaataccacctaataaagccatatgaattgccatatctgattcagtaacggtatccataggagatgaaacaaatggtgcctttaaagtaatttttttagttaatcttgattctaaagagacaattgaagatgggaaatcaattttacctggtaaaactaaaaaatcattataagttaaaccaccattgactcttgaatccattaattcagagactgataaaccatccttttgggtataagtttttaagtgagcaattgcatctgaagtatttaaataagcagacatcctgtttatattattatattattaatttagtaaagattacttatgtaattaagagattacagtaaattaaaataaacattagaagagattaaaaaacccgacaaattaagagcaaccaagccagccagtaaatgaaaataaatgaaaagaaacgacatgagaaaaggaaaagggagcactttgaaataaattgagaaagtcaagtccttttatacattgtctgtgaaaaattatttcttttacaaaactttaataaaaaaaatttgagaaaaacaaaaaaatttaaatttttttttcttttttttgacttctttttgtaatgattgataatactgattatattattagtaataacactgtttacgtaatacgcatatcatgacaattggcttgttgtggtgttttaataaattttaaaaaattgccccgtttaaattgttatcttctcaaaactgacccaaaccgatttgattgattatggacttataccaatttttcatacattttgggtaaagaagtacatacttcttacacattacattacaatggactctcctagagataataaacagtctcgatatttccaattcttacaatcaaattcaactttagactcaatatcaccttctcaatcaccaacaaaatcacttggctcattaaaattagataccgatatttcaatcatagataataataatagtagtgtgaacaattacagtcctttaaagaatggttttatgtccaattctgctcaattgagtaattcctcttctcccactctgaaaattaaaagattttcttcacaaaattattataataataatagtaacacaacaacaccttcacctactaaaagatttaacaaaaatcgtttaaataatatagaaaatagagattattcaaatgattttataataccgtcaccctcagaacgtaagaattctaattggggagatttagaggatttatcacagttagaaactcatgatagtcattcaacattttttaatcaaccaatgttatcccccattgataactcacctagaaacaataacataggcaatagccatagcaatttatttgactctcctacttctttatctaaatccgtgtcgaataactctttcaatggacaatcatctcctttaatcaaccgtttgaaaaatttaaattttacttcaactcattctttagaatcaaatataactattggatcaattaatacaacaaatgcaactgcaactacaaatacactcaataaaatctttaagaaaacaaccttcaacttcttcaatttttacaaaattaccattaaatatgcaaataattgtaaattcaagagctaaagatagtatacatgatttaaataatttcgttaatgtaagttatgcagaattttgggatttaacccctgaggaaggtaaatcctataaaaactggaataagttagaatttgaaattcagtcactaatatttgaaatctttactaatctcaaaaaaataaaatttaatttacatagacttatattcatttatggaactgaactgaaaaatactggtataatatcagacactgtatataataacacttttgaagttttagctgaactatatcattatttaactaaattcttggtgaaaaaattaaaaccttcatttgataataaatttttcgttaatgatactcatatattaaaattattaacccattggtttaaacaattaaatgatcaatatcaacatatatcaagctcggcagtttatttatcaaccatatgttcaaatgatgaagttaaaaaaattataatgaatatctcacaaaatgatcaaagtaatatatcaaataggagtgcagtttctccaattgaattgtttaactcctattttattaaactgtttacttccatccaactattgtttgatagattgaaatctttatataaagaagacaataacttaatcaattatgaattatcagataatttagaaaatataatcaaaaaaattaataatataagtgattcaacatcagagttagaaaagaaaattgctttcaatgaaaaactatcttataaaactgaaattaatttttctcatatggaaatggttaatatgtttgatgaaaataggaaatcaagagaacctttgaaattagaatttaaatcacataatttattatggtctgattctttaattgctccatttgataattatttggttattttatcaatcaaaaatccttcaactttaaattttttatctaaagaggaagaatatattttatccaaaaacccaatacctttacaatatttatcaattgatacctatattgatggcgattataaaattttaattctaaaagatattggtagtaaaacatcttattatttcagaaaaatgaatgatgtttcaataacaatagttgatagatttataaaagatttgaaattattacaagaagaattttggaaatcacttttacataatggaaaaattgaattaaaaattttcaataaagataattttatatcaaaatctgattcatatccaaattatgatgttaatttaatttcaaatgacgattataatttaattaatttaacagtttcaacttatgaagctttacttgattctaaaattgatcattcatttgaaccattacttacaaatatattaagttgtgattattttacacgtaagacttcaaatataactgaaagaataattgtcattggaaccaatttgggaatattcatgagtaaagcatcagatccgactagtttacatcaagttcatcatatgaaaaatgttaaaaaattaactatacttaataatgaaattattatttgtataagtaatgattcattgtataggttacaaattgaaaaactatattcaacttataaatatggtttaccaccatgtgatattaatatttttgaagaaaataaaagacatataaatgattattcaattggatttcaaagtttaaataatggtcgtccaagtagtagtggtatgccatacttatttacatggagtgaaaaaaatgtttactatagtgaattaaataaagctaatggttataagttcaattggcagtcatttaaaactcattataatataattaaattgcagactgtttatgcgaataattttggtattgctcataatgttgataattcagctgtctggaatttgagtaaattatcagatattagatcaattggattaaataatttagatattaaggacattctgaaaaatgagaaaccaataggtatttttccattcccaaataaaacaaaaaacatttctgaagttttaattgttttcagtaaattttgtacaagagttaaaaacgttaaaggtaaatatattcaatcaactgatgaaattatttggtttggatctatttgtgaaagtgtttcatttgattgtgaagagaaaatattgattgcaagttaataaacaatctgttgagattcgtaaactatttgatgaaacatcctaagaggagtgaattaattggatgtcttttaggtcatgatatttcattaattaatgatatgccaggtaaggcaattttgaaatgtcatagattaaataaagatgattccaagttaagtacaactgttaaagaatatgaaaatcaagttatcttcaagatcaaaagatgtcatagcttctgttaaatgattttgtattttactgtataataatacaatttgtatattaaataaattaaacgattctgtatatagatgtcagtctcagttattcttctgcctcatcatcttcgccttcttcttctacttctacttcttcctcttcatcatactcgtcatcttcttcttcttcttcttcacctaaaataacttgtgaagctaatggtaagataactcttgcaatttcactttcattaacaatagtttcatcattttcaggtattttcaagtttaaaatttaagagagtttcgtcagcagaattgatctattatatcattatcattttgatattctgaatcattatctaaattatgttcaaaatcatattctaatgattgtaataacgcaaattttctaaattgatctttaaattcatccttggaatcttgaaatgttttgaaaaaaattgatttaatttcataaactgatggatcatcaagtttaatatattgaattttatcatcaaattgtttatttaaattttcaatatcacgataatgtctctcttgaattaataattctaataatctattctgtaatttagaagtagttgaaggatccttaaatgttttacttccacctaatggattatgaattaattttgagtattcattaggaattgattcaaataatgcttcaattgattcaatcaatgaactttcattattatcaatacattcctttatacctttgaataagaaaatattgtaatctaatgcataatcatgaattttggatagattttcccttgaaatttcagttaagactatctaattgaggagatactgttaaatctaacaccatttcaatacttcccaccttaccaaaagaacaacatttcctctccatttatcatctgatccaactcatcccacatgcactaaggctacgtaaagaatcactgtaattgaacccttaaataatttaaaaaaagacgcgacgttttctatttttaatttttcaaatgaatttgtggtcttctcagtaaattaagttctgattgcattaaattgtgtttcttttcgaacaaaggtttgtcatcatggagaatacaccaaatcaaatggatcaaggacaaggcacagggtcagggacaagtatctgggcaaattacctgggcaagcacctggtcaagtacctggtcaaggtcaacttcctaatagtcaatccgcgtcaccaggtcaaaatggtcagaataatggtcaaaacggtaagattagctttcaaacaattcataatcacgctagacaattgcttcgtcagtataccgtagaaaaggaagctgcagagaaggccggtctggctactccggaaggtaagcaacatatggctaaggctgagaagataaaatctattcttgtaacgtattctaaaagacaaaaattattacaacaacaacaaaagcaaaaacaagctcaagcatcaggcacaggcccaagctcagggacaacctcaaggacaattgcctgtacaaattcaaggacaatctcaacaatctcaagtacaagttcaaactcctttacaaaattcacctcaaattactccacaatcaaatattgcatctcctcaagtatcaataccaaataataatcaaggttcaccacaacctcaaatacctcaatcattccaacaaaatacttcctgctattcaacaaccagttcctaataatccgactaataataataataatatggcacctgttccacgtatagccactcctcaaccaatagagggtagaacactttcacaacaaattagttcgttagaagcaggtttgaatggtggcttcatcaaatgcatggctccaatactggtacaacaactcctattacacaaggttccaaatggtactaaatttgatccatctcaagtaacacttacaccaggtcaacaattacaagttaaaagacaacaattattaaataaatatcaacaaattattacaatgtccgatcaatttaaaaagaatatgattctcattcagaagaaacttcaagaacctaaccttgatgcaaatatcaaatctacatttacttgaaaaggaacatgaagttaaaattcgtcttgaaaattgtaaaaaatgtacactcaacaaattgctgcacaattaaaactggcacaacaacaagcacaacaatatgcacaagcagatgaatcaacagaatcgttcacaaactgcagtcccctgccttaccattatcacaaattccttcacaaattcaacaagattcgaattttacaacaaatttaaacagggcacaatctcagggcgcagctccaattcctcttaatactggtgcacctttcattaattcaactggtttaggatctccgattactgataactcactgctaggtaactcccagatgaaattaaacaatacaggagttggtacaccaggttcaagtaataaaccagcacctaaaaaggaaacaccaacaactaaaaagacagcagctaaaaaaaataacactacaaataataaaagaacaaatgatcaaacatctaatgatacggctgttaattcagctggctcaaatacatcattaaacaatatgacaccaaataaaaaacaaaaagttggttcagctccaaattcttcaagtactggtaaaactgcggtaaatgctaatggtgcaggtagtgactcttccaaacttaatcaagttacttcatcattttcaattgatagtgttgaaagagcaaaattccaaaatttaaacattcctgatgatttaaatattaaacaacaagatccggtatcaattaaaattaataatcgtccaagtatgttagatggtaatgcaattgcatcatctgctttaagtaatcctgttttagttaaaccaccaaaatttgaaattgaaggtgatcgtgttttaaataagagaaaattaaaggaattagttaatagtgttgcaagtgaagaaggtgacatggaaattaatattgatggtgatgttgaagaattattattagatttagcagatgaatttgttacttcagtgacatcattcgcaagtggtttagcaagacatagacattctgaaaatcttgatgttcgtgatgttcaactgcatttggaaagaaattggaatatacgtattccaggttatgcagctgatgaaattcgtatgataagaaaatttgttccaaattctgctcatagttctaaagttaatggtgtttttatcaataaaagtgttcaaaagggaccttaatgaatgtatattatatattatttaaagtatttctgcttgtttatgtaaaatcaaaaaaaaattgtcaattacacaaataaaagcttatgataataaggatgaatattttgtaaattaaacgactctatattttcttttcatgattttctaatgatttattcagtaatatgaacatcaaggattatgtattaccaacttctttagttgttccatttggtgtcaatatagatacatttatttacctatgtttattaacgatatttcacccattgggaacatggattttacgtttcggaagttttgaattatttagtgaaaagttctgtttcaccattacattattatggataataagaggaataaactaagtattatagatcacttcctaatataaatacaaatagaacggtgttgataacgggtggcagtaatggattgggactagaatgtgttaaatcattgaactctgatgtgaatataagtaaaataattgtggttgatctatgtccaagacttgaatttgaacacttcaagaaggttgaatttctcaaatgtcgatttaaataatgatatagacaagttaatacaacaaatcaatttggaagaaattgatgtcatggtgttgaatgcatggtaaaagacaaactaaaataataagctcattatcaacttcggaattatcatcaatattgaacattaatttgatttccaatattaagcttctgaaatcttactattgaaatttctacacagactacaaataaaagaagacacatagttgtgattggttccgtacttggatttgttggtccatgtaagttaggtatctactcatgtactaaaatctcattattagcaattcttgaatctttacaaacagagataccttcttggattagattgagtatgattctacctggacaactgaactcgcaaatgtttgcagatgtgtccgttaatgaattcttagcaccaataatagatataaggactactttctttaaagattagaaatatagttaataacggagaaaatggatcattttgcgtatccaatgtatggcagattacttccaagtatatcagatattaccatggtggatgcaaaaatgctgtagatggtttagcggtatggataatgtataaaacagttatataatagaagaacaattgtaaaaaaatgatataggaatctatttagatttatcaaaagattctacaaacccagtgattttagatttgaatgcatctatacttagaaaaccatcatcaaagaacaattcattaagtgcaattgtagttttatgtgtatttccatctaatttcagtgtaatattgtaatttggatcgaatttagatttagttgacgtaaaaacactaattgatttattctttttacttccatgatatttgacacctttttcaacaaatttagtgaaacaagtataatacaaattgtacaatgaaaaaaacttaccacagctaattgtaaatatgagacgtatgtcttatcaggtgaaatcgttcttgaactttttctcaagataatacattaaaccagctagtgcaactgatgaataaccaagtattaatttagtatcagaatacttgaatgattcagtgtatcctaaagtttcaaaaacatcacctaagtgttcgtcagcttcaagctctcattgctggaactgaatgtatagagaaccttattgaatgacattgtgcttgtggttctgacagttgaaagaaagacacgttaatggtaacatgaaaattgacaagtttaacatgcgacgtattctctacatggatattttcaatgttttggatttctacgataaaccttacgttttctggtatctcacaagagattcatatagtatagcgtttaagttggtttggtgctttaagatctaaatataatactaataaacccaattattccaattacttactaaaaatcctatacattttactctttatctaaagttttatcatggaatattaaccatggtttcctatcacctaaatctataattgttttagcaaattcagagttggcccaactaaaccaaggtctggtatatgattgacccattggagagttcaccttgacaccttcatgtattaaacctaaaccaccagtagtagtttttattatttcaagtaattttttgatttcttcttcatcatccgatgttctaatttgtaccagaattgacattggccatgcatatttcaaaccgacatgaggacctccaattccacttataaatttacccctaatatagtaaggattagatgatgataagatcattttcctggtattctggtaaactttgttactcttatttaaataaccaacatcagctaatgaaagtaaagatggaatgtttgcatcatccatcaaattcactcctccaaaaccatcaatctcataagcgtaaacatccccgtagatgggatggttaacaatagcatgtttctctattccctcataaacactgtctgcaattgattgcagtattgtagataatgaaacggacataatttttggatcattataagactttaaagttggaattactcgtgtcaattcagtgtacatgtgagcattagaaaggtattaaatactggaatatgcatgcatcatcggatggcctgaatgatgaacgaatcaatccaactgcattaagtggattaccataacctgataggggtaatgtttcagacccaatatttgtcgttcttttgaatgtataacgaacacggttcagttctccattgggttggaaagttgatatcatttcttgtttcaacactgatgcaattttaattaaagcttgagtgaccagttcattgtccaatatgctaaaatcccttgaattatcaatataatcattagttaaagttaaaaatgaagctagagaatctaactcccatttacattcaaaaacctttgaccaatccggtcttggtgtcacatcatcgaatgatgggattctaggttcaatttttgatttctttggtggttgaaatgcattacaataaggatcatcgataatatattcagcttgttgtaaaattgcaccttttatcaacgttagtaaagattcatccatggtaataaacttctgataaacagaaagttgacgagctgaatctcttaaccattctgcttgtatatcaccagttgaaataaaagttcttggcatatttgtatcgtgccattgaattgtggtatctagggtattagggaaggcattttcaaataaacgtgcaagatcagggatctttcaatttagacttgtattcttcaattattgattcaattgtatcagagtggaatgttcgacaatcttccgaaggtcgcatgaatggtaatttaagtggaccattggaatagggagggtgtggggttgatgcataagaggtataatctgggcatttcgatataacggatggtgatttgggtaaaaataggtatatcagcacaaccgctactgcaatcaatagcttagtcattataatttgttacctttttaactagcaatagagtgtataaatataagcagtcgtataaaagcatggaaatgaaactgcaaaatgtgaacatctcaaaattcatgttgcacttgcatcaattatatacggtgttttcttcttccttttcttttcttcctttaaccaaaaaaaatatacttgagcaatgtctgagttaggccaatttgttgcttcagtgccaccagtgacacgttttttaacccttgcttcacttgttgttggaggtcttcatgctttgggaatagccccagtcagtgaattcactttagattatccgcttcctttaatggaactacatcgtttacttacagcttttgtggtaggaaatccacaaccaatgcaaggtcttatggaagtgtacatggtttacactttctcccgtggtttagaagaagttaagtttcgtcgtagtgtggctgattatttctggtatctcatattggtgtttgcatttgttttaattagtggtatgtgtgttataatgactgttccaggaccagtaccaccatcattatcacctgcacttatgggagctctcacatgtacatggtctgttgaacatcataatcaagaagtcaatttttatttcctcccaatcaaagcatctttattacctgctgtatcattaggtttccgcctgctggttgatggtactcctacatttattcttgctcttgttggtgtaggagcagcatatgtttataattgtcttgaaacacgttcatggggtccactttatagttttattgttggaaaggaaccagaaagaccagcaagggttggtggaaatggatggttttatgcttccggtaaattggaggcaccagtttggttgaaaagactctttaaggaaaagaatgttccacctgctgctactacatctttcactagtgcaggtctaaaaagtacattcaaaggggagggacgtcgtcttggatcatcctgttaagaaagattagttaatagcatcatcagaagttgacaaagaatcgattattaaacggacttttgttaatcaatccttatggttatattctatttaccctttatagtcaaaagtaaatgcttttttcagatctaagttcatgcatgtaattacgtttactgataactacatcaaactattacgtaatcattggcatcctaaactaagaaagatggaaaagttatcaacttccttaacatgcagtatcttcttttccctgaattgtaatatattcatcaagatataaaatatacaaagatatgggtatttgggtatttggttatggatcacttatattcaaaccaccattacatgagacaatagggcctgatctgacgaaattcacaggtcacgttgatggatatattcgtaggttctggcaatcttcaagtgatcatcgtggaactcctgcatttaagggaagagttgcaacaattatacctgtctcatatttagattctaaatcacatgaatcagtaaaccaacacgaaaggttaactaatcctgattcacaattatgtgttactggttgtctatactacatccctccggaacatgctaaagaagcacgtgagtatttggatgtcagagagcaggatggatatacgttaaaacatgtcaactttgtagttgagtctgataaggaaaatgcacttttacaaaagttctctagagatgaaaacggaaatcctttggttccttgcactgtttatgttggtgatccagaacatccaaatgctagttatattggacctgaatctttggaggataccgcaaagatagttgcacacgctgttggcccaagtggtgagaatatagaatatcttcgccaactatgcgattcagcacctcctgattcatatcttacagagctattgaatgctgctatgagagaaaggggactttgataaatattagtttatagagaattaaataaaaacaaaaattagacataagtaaaaaaatagataccatatcagtaacaacccccaaagggtcaaaaaaaatcaccagatgctctcctgaaaaaaagatcaacactcataacttttagtttgctcgcagtgtaatatcaatcatgagtcctgtgtatgacattgatctgaatcactctgggaagttcaccgataagttaagggtactactaattttgacacaagtatagaccctttattttttatttatgttattctattgataacaaatagtttcaacatggcactcgaaaataccacttcaacagtattggctacaataggtacagttatatggtgtatccagttatcaccacaaatatacttcctttacaagaaaaagaatgcagaagggtttcctccattatttatgctactttggtgtatgtccggagttttcatgtgcttatactttgtggtatcagattcatatatccccatgcaaattcagccccatttattcactttactatgttcaatagcatgggttcaaagcatgtactatcctccacagagttacaggacgggaaaaatattactgatatctctttccttctacttattttggatagctttggaagttggaacatgtattccattacgatcacaatatgcagatggtaaaaaatggccggatctagtattcggaatcattgcaactatattcttgtgtgctggtttactacctccatattgggaattagtacatcgtaatggcagagttttaggcattaactttatatttttagcaatggattcaacaggtgctgtatttagtatggcagcaatgtgtattggtacattcgatactatggggatgattttatatgctttaatgatagctatggaattaggattgtttgtttcccagggaatatggatgttacgttttagaaacgaggaacttgttgttaataaagttgaaaagtctgatgttaccgaagttgaagaaaaagtcttgaacgataaggaggatttaaatgatgtgcagagtttaacttaatcaaagatcaagtcgaaaattttatcaactaatgaactacaagtctactttactccgataataagtctctattttttctatataagttacaatatgtacagagtgtatatacaattttcatgcttttcttcctggccatctccaacgcctaacaacttcccaattaaactctaatttgtcaataaaatcttcaaatgcacctttggtcttaactacactgatttgtgatttaactctctttaattcatattctgttttacattgtcgtagtctttcaaatctttcatcatattcattcaaacaacgtattaattcagttctatcccaatttcctaatgcttgtaagtatacttcaaataattttgttccaataggatatttcaaatcaaccaaatggtttaaaagtgattgaatttctttgtctttcttgaataatttcagtacattgatgtatattgttaataaactatcatttgggtacaatagtccttcgttggtatccccatatgctctagaaatatgctttttgaattcagtcattgcaaaatcaagtggttggatatcttgattctgcccccatttaacagtatcgtatattccaagttcgtgtaatttataaacagacacaaataatgcggatattgataattgagtgatttggaaataagttgcaatattgttgtatctattaaatgtttcttcaggtgaaaataaggattcaccaagtaaatgtgcagagttcattcttgttgatttaaatgctgttgaatcatatagttttcttgccatttctaaacaattgtaaatatctttttcagattctgtttggttcttagaaattttgtatagtttggaaactaaatgtgatctattattgtcatcgagattctctattttcaaattttcaataattgaaaacaaagtcttgggtttggtagttttatttattagtaagtctaaaacactatagttattgattccatgaatttcatgatacttcaaatactcgtgaaacaatgttccaattacatgttctttaactaagttatgataattcaattttataatgacgaactgccaaatttcaggatacttctttaaaatctcaggttcaacctttttgaaaatattgaggaggtcttgacaaattattttttcatttgattcattgacagctaagagcaaaattgaattacataaaaatttaatattataatcaactttaacactataaagtagttgatttctatcattcatatcaacattagttttacttagaccttcagatattttattggtatttttcatttctatagtgtctgtttcaattaattgaaattctttaggtttaaaattttgaagtttccagtgatcaaattgtcgttttgcatttttaaacatttgaaaagattttctaaaatctttataaaaaatcatattggataccgcaatcattgtagtaacatcaacttctaattctgagttctttgaagtcattgtattaacctgctgtgactaattttgaatgggctatattacagtattttgaaggtttcataaggtgttcacctgtatgatcaaatgaaagttgccataaaatttctcctatttgctctagtgtatgagggtttgaaatgttattttcattcaagtaaagtgatacaatttttggtaaatgatctagttttgttcttaatgcaaagttgaatagattgctgaaaagtggaggtatttttaaatctcttgagtactcactattctgttgcttcaaaagatataatttctcttgatcaattaaattcaattctgttgaagactgtttatacatttcaaaaaaatatttgtattcaagttcgttcgatggaattctcaaaagtaaatcatatttgacaatttcgggtaaaaattttgattttgttaaacttaacaaacatttagtaactgatggttcaaaaaatgaatttatccaaataagaatattatcatctcttgtttcactattgggcttccagttcttgttctcttcaaaccgtattttgagaatttggacagctacttgaaatataggattatttataatttccataattttaattgttccgaaaacactttcatcaacaacttccttgctcacaaataaaggtgaaggctttatgttatatttagaagaatatcttttaattgacttttcaaccatttgattttcatatgatggatacaagattttcaacattgtatgtacaacaatcataaatgctgtctctatagatcttgactcatttattagtttgaatgttatatcatcaacactgtttttactattctcatttattgtagtttctttaaagcataagaaagagaaaaattgttgcaaatttgatgaattgtctatcttattggtaatttcacttttcattgaaattttatgatataatgaatttatgttagtactattttgtttcttgcaaagcttcgtataccattcaggctgatctacagccagctgttgtcttatatcatcaattcttaagcttttcgcttgtgtagaataatatcttgagtaatttatatcatatttatgcgttatatgattattcacgtacggatgtcgtagtacattattttgcactatcatcttccttccaaataacgcactcaatgtcgttattctattagtagaacgcattgttcctaatgttcgtcctaatgctgacatagatacttcaagagatgtctatagtttttcaagaggtacagatttactgaatatagtgatgaaatttgaacgttttttgtttcctcctcaaaagtttttttgtatgagaatgaatttttttgaaatttcaatttctcatgggatccggagtttattacgctgatgattaacgtgtctttctgattggtttggatgataagggatcagcatgggtactattaccccacagatgcgggagatgcttaaagaggctgtcagggaggaacgactaaagaaaaatgaaggtacaaatagacctttgaaacgtcccaatagggggaataaggcacatttaacaccggttcgtagagaaagacaattgaaagcaacaaaagagacgcataagaaacttgaagatgaagattacaaagttgagaggtatgtgatacatattgaggatgatgaagatagtactaaaaaacaatcaaaggaaacagaaaatcgaataaatgaaaaacccgctttaattaaagaagataacgataccaagggcgaagccacccaaaatgatgatgtaccatccgttgatgatgattctgaggaagatgaagatgttgactccgatgaatttgaagatgttgatttggatggtgatatgaatgaaacttttgattatgatatggatgacgaagatgaaaatggtgaaattaatattactattaaacaacatagagatgctaaaaaagccaaacggaaaactgttgttgatagtgaagagagagttcaacgtagaactttacatttaatgcacttatttactatggttggacatggtgttactagaaacgcgtggttatcggatcatagattactgattcagttacagaaacaagtccctaattctttaaaatcagaattgaatcaatatttacaacatcgtgttaaatcaaatgttagtacacaatctaaaacacggaaattgttagactttttaagacatttgatggaatattggcagaaagtatggaagattaactcgcatatgcccgtattgtataaaaagacttgggatgaaatagatcctgcaacaagttgtaaaaagtctaagaagaaacataagatgacaaaacaagtttttattgcctcaattatatcacatgttggatcaagggatttagcagcacaaggatttgtagctttgctaagatcacttaacttacctgcaagattagtattctcgattcaaccacctgatttcacaaatatgaaaaaatgtagtgaaattaagaaagataatcaaaaaggtgatattgtggatctaactgaatgaatccacaacagtaagcaaagccaaaattcagagcacctcgttcaaatacaaagaacaaaaactcgttattatcaatgttgagatcaaaaaaggcttattcaaatgcaccgattaaaactgaagcacaagaggcatctgaattctctgaaaaatttggatcatggccagtattttggattgaattatgggataaagatgcaaaaaagtatattaccatagatcctatagttaaaagactgatcgaagtagttaactggaaatctaaattagaacctccgatgaactgtattagaaacaatgcttggtatgttgttggatatgatcgtattggtggtgttcgtgatattacaagaagatatgctaaggaatataatgccaaagtacgtaagaagagaataaccagagaaccctaaatgggagaaatggtgggattcattgttaaaaggagcttgttctgcgaaaagaattggagagaatagagttgatcaatttgaaaaaattgaatttgaagaattaagtttgaaagaaggtatgccttccaatgttggagattttaagggacatccaatatacgttcttgaagcagatttaaaatttaatgaagttttaatacccaaaatttcatgtggcggattatctaataaatcacattctaaaaaagcatccgatgggttcattcccgtttacaaaagaagtaatgttcatatagttagaagtcctagaggttggtttatgcgaggcagagtccttaaaatgggtgagagacctttgaaaatacgtgagaagaatattaaaaagggtaaaagaggtcgagaggatgattttcaattaagtgatgaagatgcaggaaataatgatgatgatggaagattgtatgcagaatatcaaactgaaaaatatgttcctccaccagtagttgatggaataatacctaagaatgcattcaaaaatattgatatttatgaagattggatggttcctaaaggttgtgtgcatattcgtgatccatattcacagaaagctgctaaatttatggatattgaatatgcaccagcagttgtaggatttgatttcaaaggttcaagaagagatgttaatgctaaaatagaaggtattgtaactctaaatgattataaagatgccgttgaattattatgtgatggtataagagagatggaagatgaagaaaagagaagaagagaggatttgattcaatttaagatcatggaaaatattgcttacaaagcttagaattaataagagattggctgactgagcatggtggtatatccagtgaagaagaggttagtgacgatgatactagtgctagtgatgaagatagtgaagctgaaggttttgaaataggaggattcatgcctaatgtatcaagtagaactagaactcagacaaatgtagtcgattcaggagttgatattaatgaaagatcagatttaagtgctagtgattttgattcagaccctaccacttgatgatggtgatgatgatatgtttaaaatcaagaaagtaaatgtgaagaagagaaaaacaaagaaacagaaaacatctagttccatatttgataaggagaaggaagatgaagttgtatacaatcctgatgaagaactttatgatccgggtgataatagatacgacaattcaagtgatgaagatggaaatgagggtgctagtggcggtgaagatagaaatgatgaggctagattggaagagcttgataaagagtttgcagagtttgaaaatggtttcgaaaatattgcaacagataccaataatttgagtgaagaagaagaagaggaggaggaggaggaggaggaggaggagaatattgtttataatccatcaaaggatgatgatgatgatgatgatgatgatgatgattatgaatttgaatacagcgattaataagtgtacagttgaatctatataatataaaacaatgtttaataacataaaaagtaatttagagaatataatataaagatactattttttgaacaatttacccttttgtaatgctttttgttcaagtaatttttgttctcttaaatcatctaatctagcttgttttaaagttctttcttcatcttctaaaatttcattaccagttgcttccatatcatcactatcatcatcatattgatcataataacttctctttttacccctattaaagatttcccaaatttcatccttactataaccttgtgatttcatattatcataagctcttttttcctttgctttctctctagcgtaaaatgcatcttcttcatcttcttcatcaacaataaatccatcatcttcataatcatcctcatatccatattgatcatattcatcctcatcttcatcttgtgcatcaatatcataggaatcacttttcgttgatctattgatacttgatgaatatcctttactattaaatttagctgataatggttgagatgattgatattgtttcttcttgcttaactttttgagtaaatcagggttaggtttagcaaattcaggtttcctcagaggtcttgaaagttcttgttttgaaattggattttgttgtgcaaaatcttttcttgatttcatttctggtgatgtattactcgttaaggtttgtaattcccttgtacgagctttatggattgattgtaatgctctacttggaccttttggtttggactttacaggtgatgtgaatggaatagcagatgttgaaggttttgctatagtactcgcttgttccattaattctttaaatgacaatttattagcctcatttgttggtggtttattagtaggtaaagatatattatgttttgaaggtttgaatttaaatcttgatttagttggaggtggtaatgatgacgattttgaaggtggtggtaaagatctcgatattccaacagatgatgatcttgatgaaggtgttaatgaagttgatcttttagttccagaagatgtttgccgtgatgtatttgtttttgtttttgtagtaggtttaccctttaaagcatctaatctttctctctcctttcgccttgcttcctttaatctacgaactgcagggtcattatctatgtatgatacattcgatatagagttaggtctttgccgctgtgatgttgataatgaagatctatttgatattggtttggatgatgatgttttcgactgtgattgattttgtgaatttgaatttacagatttatttgaactagttaaagaagttgaaacatttttaactttctctttcaaattcttatccgtagatattttcgatagtaatgaagagaagctcataaccctgattgatgggtgttattgtgtaaaagttattgtaaaagaaaaaaaattgttaatataaaagttaagaaatttaattttccataatctgatgcacgattcatgtcatgtcctggagtgtaattcctgaggaattcaataaaagatttaatatattgagaagactgtgtgtctatatactataccatcacatagaatactgttgtagcttatcataaatttattagagtaattatacatttgattatataggatagaatagaaatggggggataaagacattgatatattaatattttagtttgtttattaagtaaattaaatcaattaaattaattaaaattaaacaattaagtatctaataggaatgtggattagcttaataagataaccaacaacacccatcataatgaaacccataccaacagctctaatcaattgtaagtattccttttgagaaggtttagtacatttttgaataaaacgagcaccgtcttttaaaaattcgactggagcgtcagtaatcttttccatatcagccattgtaattgattatagagtagtggttaatgcaaagaaagcagaaccaaaagatcaaacctgaaagatataaaagataaagatactaactaacacgtatagaaaacgaaaagctgcaatttctcgacgatttgaatttttctataaaagtctgtgaaaaacgacttatcgtcttatgaatcgttatattatagatgttatagatgttatatagacatgttatatcgatgttgtaacagtagataacagggttagttaccaaatcctttccactcttcctcttcttcttcctcttcatcgtcctcttcttcagaattcttacccttctttggaactttagtatcaatatctaattcagtgagacgtttatctaacaatatttcaatctgtatcttctttactaatggtgggaagttctttgaaccacacaatgccttaaatggtgcaagtagaagatccattggtactttttgttcctctaaaattgcttttctttctgcaatcttcttatcatgtttttcctttctttcttcctttgttaattcttcattgtcttcatcttcttcttcatcttcttcattatcttcttcttcactaaagataactctctctaattcatctacccatacatcaattatatgatatgtaatagatcttggggttttatcatcatctttcaatatcacattctctaaaacattgaaatatgctccaattttatctgcatcccattcactctcctttaatcttactaaacattctctaacaatatatctcataagcattaaaaatttatcaactctccatttatcaagttctcgccattctttacacataactgtccaaaatgattcaacaaatttacaaaattgttcttcaacaattgattcactaaacaatttggctaattcattggctaatctttgttgtggtcttggtctatcacagaaccacattgtataaaataaacctttccataatttattaagctctgatgtatctaatttaactgctttttcctttgatgataagaatcttttcaacgtagaaagcgcattttctctaactgttctcttattagacgctaactgtctcacaaaagcattggtcttcatccttaatcacttaaatcccttgccaaaagagatcaaatatatcaacaagttcagttgaaagttaaagaaatctgaaaaaaaaattccaaagaaaaaaaaattttatgaaatttcatccaaggctgtgctctgcatgtcttctataagagctgttactatcagagatttattatacggtcttatatcgatgttttgcttctcttatggacaactaaatgaataagaacaaccagcagaaacagaaacaggggcctcctaataagagaagttatgtcgattcaactactggtaaaaaagttaatgattatataccgaaatttatctcttcaactccttggtattataataatgatgcattacaagttgattcaaatagtaggaaacgtaagactgatgatgaaaattataaagaaattaaggataaaagtaatgatagattaaaacatcaaagattgaatcctgaatctaatgaaatcattaaaaataatgaacctagacgtggtttaggtatagttgatgagtttaaagtagtggatgatacagtaggtaatgataatattaataccaatactaatattattgtcaatgatgatgctaaaaattcaaaattaaggaaaaagattagagattggaagaagaaaggtagatgtgaaaattgtggtggtaaacattcaaagattgattgtttagagaaacctcataatatttcctatatttatagagctgaatccaataataattctaagactcaaactaatcatattcttgttaaggcagataccaatgattgggatgtaaagcgtgatagatggcgtgggattgatatggatgatgaatatgatgggattgttgataatttaaagaaaaaggaagaaaaattattaaatgaatataaagaatctaataagatgctaaagatactaaagatactagagatactaaagatgaaaataaatctcttttaattgaagccataacatcaaatacttcatttgcaattgatccaaatgataaatcaataactacaagatcattaggtgaaaagccaagatatttagaaactattaaaacaggtgaagaattaagatataatccaaaatctcgtgtatataaagatctaaatgaaggttatcttaatgaaagaggtcaatttataccttatttaactggtgaagcagctgaatttgaaaagctgaaaaaatttaatagaactatacaaactaaacaaaagcaaaaatgggagaatgataaagaaggtaaagaatctgttgctgataaatcttatgcaactgaaatttctccaacttctgcaatgttaaaattaaaggaaaaggaagagaaggatgaattaattagagaagctaaaaggaaagaattattggaaaaatatggtgctctatgatctatacttgatatatgtctattggtgatactttgctgtctcaattttcccaatttgacctgagcttattgctaattcaataaatggttttaaagttccactaatttttggagcaattattaaatgtttaacaaataatttatctctcattgataaaagcattagtatcgttacctgttctgtacatgtttgattgaatatttctaaataatccaaatgatatggtctatccaataatgcaatatccataaacattttggtgaaaaacttttccggtatatttctatcagtcaatgtaaattttttcaattttggtaacgattttaagacataattaaaatcaaaccttaatggttcattgggtctatcatttcttctggtacccattgccggataatgtatgttatataaattactagaattattcaaatcgttttgaataacaagttcttctaatgttgacttacatgaatttaaaagtacatcaatctctagtgcatttacgttagtattgtgaaataaaattcttttcaaacttggtaatattggtggattaaatccaattggaattgaccttgtataattgaaagcacgatctccaaattcaagattttcaagatatctaaatttttgagataaatctgggtgtgtaactattgaaaaaaatgtatttatatgatgtctagctattgataatgatcttaactttgttggtgttttgaaatatggtaaaaatggttcaactagagacatgtcaactaaaatttgtttcaaatttggcattactaatacttttgaaatttttgaaatattaacaccatcaggatttctttttgtgtatgatattgtaaatttttctaatttatcaagtactatggtacctttcgggtcgtctatctcatcttcatcaacttcttcttcttcatcataaaatggatataatatgaatatttctaactttctaagatttttggtattttgaagaagtggaacaacaaattcaattattggttgacatgaatctgaactaatttttagttccaatagatttgtaattaaaattgcatttggattagtaaccaaatttatgaattccttattcgtgtcatcttcaaatgacaaacatagttgtttcacttgtatcgttgatttaattaatgattttaagattttaacttcatcaagtccttctaatgaaaatttttcaattacaatatcactcaatgaaactttttgatcaaataatctgtaataacttttcaattgttctaaagttatataagatttaagtgcataagaacttattaagagtggtgattctaaaactgtatttctccatcctttacatactcttaaaatattaaccaatgatctattatccaattgatcaaaaatctttttcaaaacttcaataggtaattgtttcattaaattttgtttatctataggtttagttgaatcattatctaaatttaacataagatctgcttttctcttttgaatgagagctttacctttgaattctattaacttccaaacttcataatcaacattagattcaaaattatcagtctttgagatatcagaaactttaagatagtattttaatgctagacgttcatttatatcaaaatcatggtacaatgtgaaaaatttgtataatattctcaagttatctggatctaattccaaatactcattcatcaaactaacagctttcttgaagtctctattagaaatataagcattggatagtgcatcgacgatcttgaaatgtaacttattaagtttgttctgttcattatagtattttttaacttcttcaagtaggtcctccaagagatatatcgatccactaatataccctgattcatatgctgaaagtccatctaaatatttttcgaataaagcatcaaacggcattaattggcttattgatgagaaagaacgtgtaaagaaggttaagggatcagaataattttgatgacatgaaaaatgtcgtgcagatttctcaactgtctactattcgatgcttggcattaacgactttttaagcatttaatttagatattaacaaatataagtagggatctataaaattactctatcgctcatcttataatctacagaaagtgacagcttttgtgtacgtatataatgaacagtatcaggatcaatttgacagtattgtataactaatttttgcaacctcaaattattaggtctattgaaaattttaataagtgtatcaccatcaattttgttcattgatagattaagataattaagatcatcaaaacaatgattattatgtgagtattgaatcatttctttcaatgttaagttattaaaccctggacaaccaactaatgataattgttgaattctaggtattttttcaataatgtcagttatttggcaataaccattagttggtgatggttggttattcgatgatgatagtttgttttcaaagacaagatttgaattaagtactaaatgtaagttcttaatattacagtttgtggatttgagtatatcattcaataaattaggtgtgataccactatttcttaacatcaaagttgataaattacagaaaattttagtttgatgaaatgaattaaaccaattattatgtgataatgttaatgaattctcagtttcagtttcaactactttcaatgtattcaaattcccatctttattagaaattgatttccttaataaacactcgcatatttgaactattgaaacattgggaatatgatcgagttcaatacttttcaaatatggagatataattgtagataatgtagttggttgaatgttcactcttgataatgttaagctctgtaatctaggaaaatgatttcctaagagaaaatcatcgagcagtatgttattaagtttattattagttgcattaggatcaactgaaatacttaatgattttaagctctctaaatggacaccaatacctgtagatttttttgaacgattatcaaatttggagattattaaaactaaatttgataagttataacattctcttaataatatttctaaattggaagtttcattaataatgagtggtatatttaatttaagggatttcaaattacttaaaagtgagaaatttcctttcatatagttgtgtaatgcatgatagttacaactgttaagtgtaattgataaatgattaacttgtatgtttttccttccaaagaataacgataagatactattttcacaagaatcatgaggttcaatgttaatagagttgataaagatagattgcattttctttttttgattatgtttgataataaattttaaacatttttcaaatgattgtttccttatactttttttcaatgtgatatcatcaaaaatgttagatgaaccaataagtatatcgtgccaatatgaagatactgttaagcattggatattaaaagataatggaaattgtttaaagataagattaatgatatcaataggtaatttttgcaaaggatcctgacattttggtagttcaatttctttactcttttgagcattagaagttgaaatatccttctgctttttcaattcagttttcaattgttcatatagaatttcatttatttttccattttgattagaatttttaaattgtcttattttcatatatccttttttcagcacttcataagctttaaaagtttcatttatacttaaataaactttatttaaacgtaaataacctttaggattatagggatcaacatgaatcataattttagcacacttcaatgctttttctacattattcaatttcacataacatgcagataaacaatctaaaacattggaatagtttttatgataatgagtggatttagcaagtttttgttcatgtttatataattcaagaaggttgttgaattgaataattgcatcttggtaattattttgcttgaatagccttataccattttcaaagactttattttgattgtccattataatgtaaaatcatctgatatataattgattattcaaatacaaaaacagacttaacaactataataataattcaaattcaaactataatcgtcaacttctccatgttgtgagaatctgaaaaaaaaattaattcgtgtcggtggctcagtctttttctcatacactgattaatgcatgcacctctttctctccttcttgaagatagaagtatgtaatagtggaaacctcttgatagctattccattgatatatctagcttcttcttaactgttagtaccttctatttgagtgtatttatttaaatatcaagggttatgatcacgtgactgctaaaaaagctttgaaaggcttcttataagaaatttatacagatgataacaatttctaaatattttgaacaagaggttttttcataacaattattcatttcactattagagtgatattatcgtattaatacaagtaatacacctaattactgattactgacaatactatactaccatctaatcaataaaaaagagggttaaacctgtctaatacgaagacctaccacaacatattacttgtcatatagcaaaatagatttatccgcatggtacccaaaagggaaatctccagaatctcggctattatatctgttatcactgggattgacgtaactatttttattttcagttttccatatcttattcatattgataactgataaaaaatggttatatttattggtaattgctgagtttttcattcgattatatattaaaagataagacttcctgattacatattttattctatttatcttatcttatgttttcattcatttaacaaaaacaatggcaccaatcaaatatccacatccaaatccatcaaaatcttattggattgaagaaggtccaaatcatttaaagaaacatagaacaactaaagaattaccaactgaagtggaccttgttattattggttcaggttatagtggtacatctgttgcttctcatcttttattattaaataaatcagaaaagggtgaaccttttaatggttcaattttaatgttagaatcaagagatgtttgtgctggtgcaactggtagaaatggtggtcatattcgtggtaattatcaatcaggtcaagcatctttcattggaaactttggtgagaaaattgctgctgatatggtcatttttgaacataatgaattacacaaagttaaaaaattagttgaagatttaaaaattgattgtaattttaatttccgttattcttcacaaacttttgatgatgaaaaaacttatgaagctggtttaaatgatttttatgcttatcaaaacaataaatatattcctcagtatcttaaagatatgattcaaattaaatttaaagatgataatgatcctttattacaacataaagttggacctttctcaattactgctccaacaagttctgtttggccttataaattagttactactttattagcaaaatgtattgaaaaaggtttaaatttacaaacttatacaaccgttttgaatattcaacgtggtgataatgatacttggttagttaatactgaaagaggtgttgttaaatgtaaaaaacttgtttgtgcaactaatgcttacacaagaactttattaccagaatttaagggtaaaattataccagttaaaggtgttgtgtcacatatcaaacaaatttcaaaggaaggtgaagtaaatgaagatattaatagattacattataattattatcatacattcccattagaaggtgattatgttaccactcatagtaataattcaattattgcaggtggtggtggtaaaacttatttaccatatccaaatagtgttgatatgtttaataatatggatgattcatattgctccaaaggaaacaattaattattttaaaaattatccaaataaattttatccagaatttgcaaaagatacaaaatttgaaaatgattatacttggacaggttgtatggcttattcgaatgacgatgtaccatatgttggtgatttaactaattttggtcgtaaaaatgttttcattcttgcaggttatacaggccatggtatgccaagaatttggtcatgtggtgaatatattgcagatttaattactggttcaaaggcaagtgatgttcctgattgttttaaacttacattagaaagaatgtataatcataaacatgctttattctctgatcttgcaggctatgatattaacaacagaggtaaatttaagttataaaacgtaactacttttatgtatagaatttaaattagaataattaataaaacttaaaaaatgttataaatatagcttataaaacctaatctaagcttgagtaatttcacccttaacgacaacatcaccagatctaccagttaagtgcattttaccttctctatcaatttgaataataacatcaacatttttacctgaaccaacaccatttaatgacattttcgcaagtaaagtacctggtaaatattcaacttctctaataatttctggttcttcttcttctgaatcttcttcttcatcagaatattgttcaggttcaacaacagtttccttaattgaacgtttaccttcataaaattcaatttcaacattatctgaattactttcaaaagaaatttgtttcttaattggatatgcagtttcctttgataaaattgttaagaaattaccatctaaatctttaataccaattggtacttgtaaatgttcagtattaataataattggttgtaaagattctttaatttcttcatcatcaaaatttgcaattaatgaagcttgaattgctgcacctctacaatttaattcatttggatttggtaattttgaatcaattgcaggtgcaaaaatttcagttgattcagggaaaattaatgataaagtatttgcaacttttggaatatttgaagtaccaccaactaataaaactgaatcaatatctaaagtttctaaacctgcctttttaacaacattttcaacaaattgagtcatttcactgaaaacttttctaccaactaattcaaatcttaatctattaattgatgacatataatcaaaaccttcagctaatgaatcaactgaaacattagcagtttgaatatttgataaagttttcttagtaatatttgaagcagcacttaattttgaataagatttttcagttttctttgcatctgctttaaatttcttttggaaatcacttgcaaagaaatcaattaatgcttcatctaattcaataccacctaatttattactatgttcagttgataataaagtcataataccacctctaacagatataactgcagcatctgatctaataccaccaaaatctgcaacaacataaattttatcttctaaaagttgattcttgttagataaatgtgctaataaagcagatgttggttcattaattaattgtttaacttttaaacctgcatcatttgaaattttaattaattcagatttttgaatttcattaaagttagttggaacagttaaaacaacactttcaatttcttgacctaaataatcttcagcagcattcttaatttgttttaaatgtcttttaacaacttcattaattgaaattttattaccattaatttcataaccaactttaccatttaattcaattggatgtgcagcatattttgaatattctgaattaatttcttcaaatggaacaccaataaaatctctaaaattaacaatagtactacgaggatttctaataacttgtgcaagtgcttgttgaccatgatattcatcaccatcaacatatgataaagttgatgaaataaatctttcaccatctggattagcaataacatcaactttaccatctttaatggtagcaaatgaggtaggtggagttaccaaaagcaataccaatagtagccattctatatattttctatcgttacttaaataaaagtatataatataattggaaaacttatagaaagttatatatatatattcatcaaggttaaaatttaccattaattaccaaatttgactgaaagatgaaaattttcaacaactcaaaatttttacatcatttcgaatcctcaatagaggttatttattatctacatgtatttattatgtctaaggtaaatctatataaatctaatatcaaagtataaacccaacaccaaatatgaaagatactaaatacaacaatcatcaatgatcccttctccattgatgagatacctgattcatattctatacttgtagaattatgaaattgtctaattattgttccatttttcaatgataatgtttcaatatctgtaatattttgaatatcatatcttttaaatgtgattgattttgatttaccattaatcagttgtggtgaaactttaaattgttccatatcatcaaaatcatcgaaaaaatcatcagtcatttcattagtattttcatcattatcatgaatatgattagatgaatcatcttcatcatcacattcatgtgttttatgtttaataattgatttagttgtagttgttgtaacagttttagatttagttattaatttaacttttgttttaattgttgtagcctgtagttgttgtagttttaataacttgtactagtagtatgaggtgaattattaattgttgttgtatcagtattcaatactctaacataacctttattatcaattacattaacattaatattaacattacttgcagtttgttgtggtatagtatttgaatttgaagttaaacgagcaggacaatttaatccaactcttgtaactgcatcacaaactcttgaaacaattgcaaaattattatttgtaacagtttcagttttggtaaataaagtttcaacgaaaattgggaaatcttttgcttcaattatatttgaattaccattaccattaattgcatttgccttaaatgataaatctgatggtaaacttgtaataaatttatctttaaaaattgttgtaaaatcaattgttgtacttgttataaatttattttcaacaattgttttccttgcaattgaagttgttgaaattgaaacatcaataagtatatcagtaactgttgtagttgaagaaataattctattttgataaattgttgtagttaatttatcaatttcagtttttgtttcagtttctttaattaattcagttgttgtaataaaatcatgaattaaagttggtttattagttgctttgaataaagttttttggactagttgtagtttgaatacttagttcagtttctgtttgaattgtaatagaagtctttgtttctgttttagttttataaggatttttattctttttattattatcttgctttttattattatcctttttagctaacagttcaaaattattattgtcattatcattatatacatttttcaaatttctaaagtttgatagtcgattatttagaatattatcattattctgcatattattatcattattattaatattattaccaatattattatcaaatccagttttaagtttatttttatttacagcctttctttcattattggatttcccattattaccattattattatttgataataatttaccctttaataatttcctatttttaattctttgatcaatttgtaacactaattggaaacaatcatcagatattatatcaatatgttattattattattattattattattactattagatgataaattatctgaaatttcaggtgatttctctaatgaatttgattctaatttaattttacatactttaggatatttacctgaattaaattctaatttaaattcatcatatattgaattataagaatcaggtgaacaaagttcaattacttgttttgagaaactatcaattgtgtattctaaaaagttattatcattattaacgttatttacattattattataattattatttgcaatatcatttaataatgtagttataatacttttcaaatcttctacacattcagtaaatgtataaggtattgaatatttcatactcattggtataataggtaatttattatcctcaattttaattttactaatatctttattattattattatccttattattattatctgcatcaaccaaaaatataataaacaatacgtttattagaataagcaaagactgtttcattataattataacttatagtatgttttatttaatctacaatgttgtattgtacaatgaaatgaaggtatagatggagatattctaaatagagaaaaaaaaaaaatttcatattgcccattttaattaattaattattcctattcctatacctataactaactacaccttttgttgtaattgttgttgttgcttttgcattaattttctcttttgctttgcctcaaattcatgccattcacctttaatatttttaaggaaatttaatggagaaattggtggatcttcattaaaataatcatgatttaaagcttcattagcagttaatcttttctttggattcatttgtaataaattaattgctaaatctaaacattttggtgataataaatttttaaaaatatcattaaattttgaaattgatttaaaatttggtcttaaaatttcaaaccaaggtaatttataacaattattccaatcatttatatcaattgtacccattatatcataaattttccataattgatcaatttcattaataccttgaaaaattgcctttcttgtaaataattctaataataaacaaccaataccccaaatatcaatttctctaccataattagttgaacctaataaaatttcaggtggtctataccataatgttataactctatttgtatagtttggatttaatttattttcatcaatatttttcatttttctagctaaaccaaaatcagttatttttaaaataccattattatcaattaaaatatttgaacctttaatatctctatgaattattctatttaaatgtaaatattgaataccttttaataattgattaaataaattttttttttcactatttgaaatttcaatattattttgttgtaaaataccacttaaatcatgattcatataggggaaaatcatgaaaacttgatttttttcaaccataatttcatttaaaccaacgatattttcatgatcaaaagattgtaataaaccaatttctctatgagaagttattgggaaaccttctctctcagattctaatcttaattttttcaaagcaactaaatcatttgttaaaatatttttacctttataaactttaccataagtaccttcaccaacttgttgaatacgatgatgaatttgttgattttttgaaattttacatttaatcatatatttgaaaagtttattagtattggtataaggtgatttctttgaagtatttgatttattagctaatttagtaaatacgtcttcatcatcatcatcattatcattatcatcatgatcttcatgatcattacgattattattattattaatatgatcgtcgttaatcgtatccaaggtatttaagagagggtaactttccccagtcataccctttgggccagtaggtaattttattcttttattatagtaatcattattattattatagtgtctccttgacataataatgtaatatacacgagtgctagaatagtatagaatagaggtgatgcaaagagcagaaaaactggtaataataataataataataaaaatactataataataataataccaatgtaaccttccactaagagagaaaaaaatggaaaatggaaaatggaaaacagaaactgttaaacccgagactaatataaaagttcttaaatactaataccaccgtgcatgtaaactctattttactctatttcatttcattttattatcaataacgcaaatctattttcattatcaattatattttattattttattattttattatctatttggtgcattcgtttattacatgcactccgtttctatgatatatttatatttatctattttatctattttatctattttattatctaatgacaccatattatactctctttaatgtctttaatgtttcccatatttattatatttctatttaatctatcttatgtcttatattatatcttatcaatgattatataaatattaacgcgtttcacattaaagtttgctttgcaatcttttcttaaagtcttacattacaagataacatcaattatcattatacaaatgtcttgttatcaatcaaaacactctaaattacaagcttttaaatataaagatcctctagctgctgataaattctttgtttgtgataaatctttaaaattatgttgtagaccaaattgtgatttaggtattttaaaaaatattaatatcacctctacatctaccaataataccaccaataataatccaatattatcagataattttatggataatgataataataataattatgaatttttcaattcttataacgatgttttatcaaataattataaattatgtcaacattgtttcccaaatttaaataaattatcttcaattttgaaaaatgaaaattttgttataattgatttaaaattattattaaatacaattaaaaatgttaataaaaatattggttttgtacctcctttattaggtaattcaaaagaattctttacaaaatcaattatgaaaatgaagaataaaaaattaaggaataaattattaaaatgtgatattgatgatattgatattgataatattcataatattgatattgatattgataataataataatattggtaatgataataataataatgaattaataatgaatttaataatgataatgaatttactaatgattttaatgagtttaatgaaagaaaattaaatccttctaaaaatgatattgaacatttaagaataattgatattgcttgtaggcatattgcattagctgctcaatcaactttatttggggttcaatttgtttatgatgatgataatagtaatactactactactagtaagaataataatattaaagttaaaattgatagtggtatcaataataataataataatatagaagatttaacaattgataatgaaattgatgatgaatttgaagaaaatgaatttgattttacatcatctgataatgaaagtgatgatgatggtattgttgataataataataataataataataataataacatcagttatgattttgatattataaataatttaaatactttaagtgattcagataatgatgatagaagaggttcatttgttgtacatcatcaaagattgaaaactaaaaaacgtagaggtggtgttttaggttttaaagaattagctgcaaaatcatttttcagtccttggcattttcatagaacttttaaaaatttaactggtataacaccaaaacaatatggtgataaatgttttaaatatttaaattcaaaaaaatttaaatatattaaaaatttaaattcttcacattcaattataattaatgcaaaattagcaaatccttcatttgtttctgatttccaatttaaaaatattaaggatattaaagatattaaggataagaaagataaaaaggatattaaagataaaaaggatagtaaggttattaaggataataataaagataagaaaattgatccatcaattgataataatttcattagtaatacctcaaataataataatttgttctctccaccaattttatatagtagttatgggaataatattaatcaaaatcaacatgaacatcaacatcatcagctacaacaatcatataatcaacaatcatataataattataataaccactattatttaagacaaccattattactatcatctacatcaacatcatcaaattcaacatcatttacaaatacaactacaaatactgaatcatcaatattttcaattgaacaatcaattccatcatcaatttcatcatcaccaattgaaaatgatttttataatttaaaatcaaatttaaattttacaaattatgaatacgataatgataatgataatgataatgataatactattatcgatactagcaatattcaagaatttaagaaattagattattattcaagtttacaagaattaccgataactaataataataataataataataacagtactaaatcattattacaaccaattcaatttcttaataattttgacgaatcttttgtaaaaaatgaggaaaatgataataatattgaaaatgaaaatgaaaatgaattagaaattgaaattgaaattgaatctggaataacaaatagattttgttatcaaaattctaatacgaaaagtttaaattattatgatagcaatttacaatataataataatagtgaagaatttaattacggatatatgaaaagttcaaattataccttattcgaggaacaatttttaattaaacaacttcaattacaaaattctttagaaaagaaaattaacgaaaaattaaatttattatttgatgatgaaaatgacaattttattgtataataataataataataataaaaataataaatgtgtaaaatatgtataataattgtaaaatagaactaaattaggaaactcaaattaaacggtttatggtaccaattacgtatatattgtacactaaaaaagcaccattataataggaattatggtagtaaatttaagtgaactaggtattaattaattataaagagttttattaatggatatataaataatgctaagaaattttattcattaagtttagttaatacaatttaaggtattataaattataatagtactattataataataggtaattttagttttaataaggttttaatttattttaatttaaacggaatttagtaatgaagtagacgaatagatttttaagcgttctagaatggcatgataattgataattaaagtttttaaagtgtttcttaaaatgtgggtattaatatagtgaataacggtttttgagttttttcagatgggacaattggaaaaaaaaagaaacgaaaagaaactaaaatttgttttacaagataaacaagataaacaagataaataaacaatagagaaaaactaaaaaatggacattaaagtgaagttaaaattattcaattgagatgacgttaagtttcagattaatttaagaacaatacatgaaacaatatgaaacaataaataagaatttaaaaattaaagtatactatatagtatataattagaggatattgatagagtgcgggaatattagttcataaattggtaaaatacaagaaactttaatctcttaaatttatgtaacaactgattgtttaaattaatttatcaaagataaatcaaagataatcaaagataatcaaacaatttcgcaagtcccgatgaataaaaagatgcattagagagatagaataaacaatagtataagagatttcgggattatactaataaaattattattattattattattattaatataagtgtaaatcagctgttcttattacttatttaatttattgcaaataaattattatatcatattacgtaaatagattacgtaacaataacctcttatatcacgtgatcaagtattacgtaaacaatttattttatgttacgtaatattcattacataagcatacattacataatcacatgggaaatattaattataatagaaaaaaattttttctacccgttttctaaactattaacaataatttgtcacaccctaatctgtatacttggttttattgtataatctacttctaattctaattctaattctattcacatcgtatataccttatactaataaccatctatctattatattatataatattctatcacaaagttaactgatataaaaaacttataaaaaaaaatttcttttttttctatttctatttctatttttatttaaagatgattgatttaaatatcaatgataagaatgatcaaatttcaaataatgatttaaattcaaataatccttcttctataaaacctaaaactataacaactgaattatttgttgaaaaaccaaatgttggttcaattgatcatttagcaattagtgaatctttaggttatcaaatttttagaaaatcaattagaaatgcttggaaacctgatgaagataatttattaaaaaaattattaattgaacaatatttaaaaattaataatttatcaatttataataatgaacaaattaatattaaagatattgattgggttaaattagctaataatatgaatacaaaaagaagagcaaaagaatgtaggaaaagatggattagttcattagatcctttcattaaaaagggtaaatggactaaagatgaagataatgaattagttaatgcttttaaaaaacatggtccaaattggaataaagtttcatctgaaattaaaggtagaaatgaagatcaatgttctaaaagatatttagaagtacttaattgtgatacaaaggaaagattaagaccttggaaattagatgaagatttaattttaattaattgtgttaaaaatattggtacaaaatggagacaagtttcaatttctttacctggtagaccaagtttaacttgtcgtaatagatggagaaaaattatgaatgatattgcaaaagatactgctaatgatataattaaaaaagctgttggtgtattagatgaaaatggtattccaattgttaaatttacaaaacttgataataaacatgcgaaaaataataataataataataattcaaaaattataaaaaatagtaagaataaagataaggtaaagataatgatagtaatgaaaaaaatgataataaagataataataataaaatcgataaaaatgataataatataattaatgagaaaaatgattcaattactacatcaagtaatgttgatgtatccccagaagatattcaagttgatagtccaataataactgataatttcccaaaattaacaaacaataaacgacctattgaatctataaataatgaacaatcttataaaaaatttaaatctgacaatcaaaaaactgataataatacaaataccaccacaactaataataataataacattccatttgataattattcaacatcatatacacgaatagcaacacctttaaaaactcaaacagattggaaattttcattaattgatccacgtacaaatgaagaattgaaagattataatggtaaaattgataatcaagaattagctcattatttaattgaacttgcaagacttaatggtgttgcattaactgttcatcaacatattcatcatcattattctccaactcctgaaaatgttaatattgatcctcaagcaaatattcaaagatatggacattttaattatttacctccattaattgaagttccaaaattaagttcatcttcatcacctgctaatacaaatgattcaaataattcaaataaaacttataatgaaagttcattattaagattattaaataataatgaagatgataaaattaaaaataagaataaaactagaaatggaaatattaacaatgaaaaaaattataataaaaattcaacaaaagaaacttatttatcttctcaaagacaacaacttttcccttcaacatcaaattatataacggcaaattctccttcaactcaagctactaataatacttcaatcaataattcaattaataataagaaaaatgaaacaaaaactgataaaaagaaagaaaataataataacaataataataataccactaataaatctttcaatacagaagtactcgaagaagaattagatttttgggaaactatgagatcaaataaaccagtttcacaacatcatccattacattattatcaaccatcaaattataaagaacaatcaccatatcaaacatctgattcatttggaattcaaagattcccaaatatggcaactccattagctgcaaatatgattaataatgataaaaatattaatttagttcaaaataatgtaactaatttaaataatgatcatggttatggatcaatttatttaaatggtgaagaagttaatgaagaagatgatgaagaagaggaaattgatattgcaaatcaatatggtatgtattatagtgtttttgcaaataaaagtaatggaaattttaataatttcagtaagcaaaataattcaaatgttaataataacaataataatggaccaactggtttaattaatagtggttatttaatgccatttaatccatcataatattattttctttttttataaaaaaacaaatatgtatattagaataagaacaaatttaattaatagaaatttaaataactttacgtataatatattttatagaatttccaagaaaaagaacagttatttaatataaatttatatgaagatgaatgaaatgttgattagcaaaaaatgaatgttatgtggtacgtatttagtttagtacagacctttaacaaagaatctagaatttctcataaaacttgcagcattatcataaacataatcaccataataaagatatttatatgcataatattcaacatttggttcaccaattaatccaatatttggagttacaccagtattttttttaacacctgataaaaatcctgcaattaatgttaaatcaactgcaacatgaaagatttttcccatctataataataatgtgttagtatcattctaagttattattaaattaataggtatacatacagccattatattgtttagattatctatatttacaaagagaacatggtgagccattgacattattgatgtccctgtaatctaaccttgccttgatcttagagattcaatttttggattacgtaatatcatttttctaatgagtttacttacagttagttacagttatgttttatatatatttaatgaatgaataaacaatggtataataatatagaatagaatataatagatgaatgaattaaactagaatgaatattcttcagagaagaaccgacatttttctttggttgcaatactttcacatcttttattaagtgaaggtggaccacatgaaacaatccatttatttgcataatctaatgtctttgataaacttttctgtaaaatatcttcaagatttggtctcttacctacaattgcagtatttgcaaatttagtttcataagtatttaatgaatctgatgaattatttgataattccattaatggaactgcagaattttcactttcttgcatatcaatttcatcttgttcaagtatatcctcattaattccattagttatataaacatcaacaccttgaatatttaaatcgttaagaataaataaatcattttcatcctttgttacccaaataaattttattttaatatctttaccatctgcaataatcaatcttttgaaaaattcaaataaaactaatcctaatgaaatacctgatccaccacaaacaattactatattttcagcagttagaaagaaattttcattaattgaagatttaaaatttgtttgaattgaatatgtttcaaatggttgtaattgaaattttgtatttttaacaattaatgttgctaataaatctctattttcaaatgttgtagcaacagtatatggatgtgatggtaacataataaaaaacggactccatttacttgcacctattctaacatgagatccaggtaaatatgattcaggtaacaaacttttaggaaatttaataattttataatcacttcctggattttcaataatttcagttattgtaatatctttaacatataagtatttacgaatatattgtgcaaataataatcctatacttataaaataaaatagactaacacctggtcttgcatgtaagtatgttaatataatataagttaaaaaaaatatattgtggaaaacatagaatactttataattgagatttcttattggtttccaaaaaatcatcattataatacctaagataaaaataataactccaatgaaattaacaggtctcaaaactttctcaagcgtgttgttgacaacataatagattaaaaatccaattccatggaaaacacctagtaaaacaataattcttgaaatccatttatgtaactgtaatgtgttcaaataattatcaattggaaaccaggaaggttcagctgccaagaatatagttaatggagttaaagtatatgataatctacccattcttttgattaaaactgatattttctccaaatgaggcttaattaccattaaaattgcaattgttaaaactaccaatgaaactgtaatcggaagtggtaatttactaattcttagattacttgttgatctacctgatcttttccaagatctattataaaattgaagtgcagataatctaattattatgaataaacatgatagtccaaatagtatataaccatatttaatgttaactttatgcaatggattgtgtcttttcactaattgcaccacatcattcaattcccccaaactattctctatttgagtcattgtctaatataataaaagaagatagcagtaagaaagtacattaataatgagcagattaatcaaatcatcgataattgtaataataattgtaataattttcaaattatgatgtaagcaagatacattaccgcattaggcaactaacggtttacttttccagtgatgggagcagaaaaggggaatctttgagtttgttagatgtcgatacaccatattcttcttgtttttactcttgtaagaacatatcagtaactaaggaatagatgttatatttagtagtattaaagtctgtagtattgactttattaggagctgatatagttaacgcaggatcaccacctgcaactgttttaaaatgtattaatattaaggcttcaggaatgtttaggtaaacatgcagattatcaatgtatttgtgatgataaacaagctattttagaatgtttagcaattcatgcaccttatgggaattatttagaggcaagggatcattttttaggttcttgtattgatagattccctcatttaattgatgatccagattataatatgaaattacctaaaaaacgattaacttcaacaattaactcagaaattatgacaagtacaactatcaaatttacttcaacaacttgggatcctacaactacaattgttgatccaattgtttcatcaattccaagtttattgcctggtgatgatgaatgtgaggatgaggataatgaaaatgagcttgaagatgatgatgaagattgtgaatgtgaatgttattgtgattgtgacgatgatgagtatgatgaaattgatgatgatgatggaaatgatcatgataaagatgatgataaagaggaagaagaagacagaagaagatgatgattgcgatgatgaagaagatgaagaagaaggtgaagaggtggatgatgatgacgacaaagaagatgatgataatgaagaagaaattgataatgatccacaattagaagaccctgaagatgaagaagatggcgacgatgaggatgacggggataaaaacaaagaggaagatgaagaagatgaagaagaaggcgatgatgaagaagaaggcgatgatgaagatgataatgatgatgataatgatgatgatgaagaagatgatgaagataatgaagaagaagaggaagaagaagaatttatcaatgatgatggatgcatttgcacatgtaaatgtaaatgtaacaaaaagaaaacaaagaatccatttaatgataatgaaaatgattcagctgatgataatactaccgaagagagcaaacttttcacagatgatgacttttgggtttgtaataaccccaatggatgctatgaagaaaacgatgatgaagatgaaactgaaattgtcgaatacttggcttataaaaaggaatatttaagtttaccaaatcaatatcaatatggtgatttagaacaaagtgaattttggtctgaagaaaagaaagcaagagctgatatcttaaatcaaatacaagaattaagaaatcaaaaaaatgaaaaaaatttagtaaataataaagtcaacagtaaacaaaattctaaaagtaatgctatagatttcaagtttgctagccctgaattaatgtttaatcaacaaaagataaagagagatgaaaacttgattgatgatacaccatataatgtcaaatccttatcatacagaaaatcaaagaaaaagaatgaagaggatagtagaataagatttggttcaaattttttcagaactaaaaagttaccaaaggctaccattaaggaagaagatcgttgacttttgtaatttgctcttttcataatttttgtatcgttgttgtaatttagaattctatatcaactttattctctactgtttgcaactgcaacagccactgcaacggcctcaacggcttcttctaattctttatcatttgattgaccagtttctgagatcaattcatcctgtattgatttaacatgcaacaatactgtatcattttcatgttcactttcatgttcgtttacatgttcgtttatattatcatttcccatagttttcacttctatttctctctgcaaatcttcaacagaagctgaaatatcttctttactcccggtataatcaatatcaatgttttctatattgtttaagtcaatggcatcaccgtcatcgacattactattttcaccatcattcacataacttttttcattctcaaagtaattattattgttactctttacagctgattcattatccgttttagtatccagaatattttgagtagtaatctcatcatttgtaaattgagttagttgatttaattgatggtttaattgagagtgatcacgattgaaagattctgtcagcattttgatatgtttatcagtattatccaatccaaactcattattgtaagcatcaataacattttcaaatgaatcatctacattagaataaataaagtcagcatctatttcatcattaagtgaattttccttatctttatctgtatctagagatttttctgtattgttatttattgtcacacttctctttttaggtttatcaacatcacttaaatcaatattgtcgaaaccttccatattcaactcatcaatatcagtgacaataacctttgctaaatttattaaaccatgattgtctgttttattgaatgacaaaccttctcctatactaatacttgtctccatagcaggtttacataatcttttcctagatctacactctgaacaaactttgaagtttctctcatcatttgataaagtttttgaacatctattacaagcaccttgcatctctaaagttttccttcgtaatttactattccccctgcatctttcacaaactttatacatatcttgattaatattaggaccagaacaatgaatacatttaccttccagaaaacgatttgatttccaagatcttaacatctctcgacaatgtagacatagtacaaacttacctgaatctggtggtaattcagttccacaacgagaacaaacaccatctttctcccttgtttgtttttgccatcgtttcgatctttctctttgctgtatcctacaatgttcacacattttgaactgtttcactcccatttgtgcaaaatctttcttacatctattacacttacctagggggaatttctgcttgttttccttcaagcatatcatcacatagggtaatcctcatctttgttattaaatttaattgttcgaaaaggactccccacatccattatctattattgaagcaataaagttgatgaagttggttgattaaagaataacatcagaaaaagtgcttacataataaacgttacaatacttctggcacatgcacctgttgaattctttgcttaaacttccctttctttaacactatcattaaccaaggaagtacaattaaatgcaaacagaagctcaatatattgtattagatattgaaggaactatttgtccaatatcatttgttaaagatgaacttttcccattttttttaaaacaattaccaaactatcttgataagtacagtttcccattagaagataggcaatgaatcaataggatgatatcgaaaaaatattaattcaatttccaaaggaagctcatcaaagcaaagattgcaatgattgaatatattaatgatttagtgagtagagatattaaagatccagtgttgaagcaattacaagggtttatatgggaaaatggttacacaactggatcaataatggcaccattgtttgaggatgcaattgaagcaattaaatattggtctgcattatgtgaaggtgtttatatatatagcagtggaagtgtcaaagcacaaaaattattacttggtagtgtcaaaattgttaatgagtcaaataattccattgagtgtgctcaaatgaatggattaatcactgattattttgatactgtaaatatagggaagaaaacagagaaggaaagttatgaaaagattttaaagaagattggaattgaggaagctgacgaggaagctaagaaagaagttttatttttaagtgataatccattagaagttaaagctgcaattgcttcaggaatgtcaagttatattgttgaaaaaccaggaaattatccattatcagatgaagacagaagtaaatatagagttgttactgatttacataccctcttctcatatgatgacgagtaggttcggtatttattagtaacatgtgtaatatcttaaaattaaaatacaagtttagtaaaacattctttatatactaccgccaataagaaaaaagattatacaaatatatacggtttctaaaagctgatggtagtagtataagatctattagtaaaaagattgggacaatgaatttaaagtgcatgatcattaaataacaaatttgctgccatttcttcatttttatcacaagcaaaatagacttgaataactaagtttctttcaaatcctaattcacataatcttgtaattgcagaattttcttcttctgtaacaggaattcttaattcgtttgattcaccttcaccttcttcaccttcctgcagattcaatatattcaggtggaatacccagagcttgtgcaagagcattttgatcaccttcagtaatatatctcagaaatgcttctggattagattgtattaattgtgacatttgtaggattacttgcagctaattgttgtaagacaacttctgccatttctggttgtgattgtaaaatatctcttacttgactcatcatatcaccttcttgtggagatgcaccattacttgcagctaatgctgcttgttcgaataaattaccagatgcctgttgaagaggttgttgttattggtagctggtgtttcagtagttgcttcatgtggtagtagcatctgcagtagcttcagtagtttctgcacctgtagtagctgctggtgctgcttcttgtactggttgttcaacaggttcagcaggtaatggtatacctgataataaatattcaacagctctatctggattattaaaagcagcacgaagagctctttcgacttctgatctttcaaaacccatagccataatattttgaatagcagtttctcttacattaccttgtgcaaatgtggaaggggtaaattcagcaattggttcattagttgcagaagttgcaggagtggtagctgcaggggtaggagctgaagtttcagtatttgattcggtatttgattgttcttccttcttttcagtagattcagcagcaggtgctggttcagcagccttcttagcctttgcaatcatgaagataatttggatcaccctctttaatcttaaactcttcaaagattttgtcattttgtaatattttacctgaatagacaaactttatttgatctgcatcacaatttttgatggaagcaagtttttcttttccagaaagaacagtttctgaaagttcaatttcaataggaattttttccttcttaaagtcctttaatatgatttgcattgcactgtttcaatgtgaaaagatgcaaaaccacggtggcaaatttgacggatcacctacaaaaaggttcaaaattcaaataatttcccccaaacgcagaagccttcaaaaaaatttcagctcggaaatttcagtacaaaaacgtaaaaaatttctcggaaatttcagtttgaaaaaattaattctcttcatttactcctactgttatgacatgaatttgaaatagatttagaaaagataaaatatagaagcaagagtatataagaagggaaagtaaactcaactaaactcaatacatcttactacactcattaagttgaatgcccgatctttctgttttacacaatttccctcaatgggaaaaacttatacgagatttggatgatgatatctacgattctaagttatgggatgacttaataacacatcatgaaaaacttgtagaaaatcatactgaattaataagatctagaaaagaattaagaacaatacttatataatgatataaacaaacttctaacgaaattcccatattatataatatactggaaacgatatcatctaatagtgaagaccatcgaaggtttgcatgcttcaattgatattttaaaacgtgctgttttaatatgtccttattcactagagttatggatggattatattcaactgatactcaatacggaaacttataagattagagatactgaattgaaattaatatttgaaaaggctagtaagtaaaatcggttatttttttacatctcatgatttttggaatacatatcttgattggatggcaagtaaatatggaatgaactcaaatgattatatacaagtattacttaaagtgatacaattacctcttcatcaatatgctaaatttaatagtaaattccaacatgtgtataagaattttgcaattagtgatcttataaaggatgtagatttgcagcaattcataaatgaaaataattactggtcaaaagatgaaggaactcttgaggattttcattgagaataactcagaattcttaataactgaatactttcaaggtacaattagaggagatcaagagactggtcaaatgaaaaatggcagtatgagacgaatttgaaattagattttgatttaacttttatagctaccgaagagatttgtaaatggctagattacattgaatatgaagaagactatcacagaggtaaaggtcaattgacaataatccagaaatcattaatttatacgaaagagctttgttaccaacatgtttgaatgataaaatctggattagatataatagatacttgatacaatacaatggacctaaagaattaataatatcaaattttaataaagcatgtgatcattttgttccaattgatatgaaagatatacgatatatgtatataaaatatatgcaattaaagctgaagaagattgatgattgcaaaagtatattcatgtcattgattgaaaaactaaatacggactctgagatagtttcaaagtatattgatttcttgattgatcttgaagaaatagaagaaaataaactcagtgtgattgaggatctaatcaagtgtgttcatttattcaacaaaaataatactgttgttgttcatactgagaaaaagcaaaaagttgcaaagaaaatcgacgaaagtaaagttgctaaggaaactgacctaactataaagtctgaggatattgccatgctatcatctatgcttaatttttggacagtaggtgaattagtggtgaatgtttgcaaatttcattggtttaagttacacaatatcaaaaaaaccagagagatcttcatgcttttttttaatacagaagctgttcgaagtagtaaagcttattggtttgcctttttcaaatttgaactttctcaaagaaacaagaagaatctaaaacatataacggataaggttaaattatggagtacattgagtatatcagatgtcaatcttattatttctgaatataattcttttgctttgaaaaattttacccttgcagagatgaaagataatgaaagagatataattaaaaatattttagaaacagatgaagaatcttctcttcatatgaaacattttcttaaggttagattagcagaggataataatgaagacacagttaataaaagattagttagagaaaatggccatccatcaggttcaagcgatggtagaccaacattgattaatcctatactatactctgataatctatctgaaattgatattaaatcattcccagtaccaaaattcaggaatgttgaaaaagctaataataatgtgaaatttattcgtgaatctttatagtgtaaatttaaacataaactaatacaaaaagaatatatagattagagtgtacaatatattgtttatttacatgacaagtttttaaatactatctgtttgtctacctataactgttaaatcttctctaacaagggctttctcagtacatctgttatcaccgtaaacttctaaaattttcaaaacaggacaaattcttgaaatgattgctaatgctgaatcatcaacagatcttacaaaacctaaatctaggtattcaagtactgggaatgttaaatttcttgataatttactaaacattacctttgaaatattttttacactattcaaattcaaactttcaagtgtctggtgtgaatgattcaagacattgtaaatcgatgcatcagttaatgagatacatctttcaaaattaatattggtcaatcctttatttatattccaatctgtaaacacttcgttcataccatcgtcatcaatttgatctaaatcaattaatgtcaaattagttaaatttgctccaaatggcttgataccttcaactaaaaatttatttgttaaatgtgaacatttatttagaatcaatgtatgtaaagtttcacaatttattgataataagttaattaataaatcatcatcaatcagattttcgttatgtggtgatgatatttctaaaaatttcaaatttggtaaaaaatgtggtaataaatcatatacaggtttagaatttaacccatcaagtcttgataatgataatgattcaagattattaccacagttttctaataatgaaactaatgaatcattggaaaatctatgggtatttttcaaatgaaattttgtaagatttttagcagtattactttcaaagaatgattgccaattatcatcattaatcaaaaatggaccatccaaagttaattctttgagattagataatttattactaaaatattgtaaattatcattatggaattgaccacacatattcaaagttagggaaactaaatttggacaaaatgaagctacttgattcattttatttttatcaattttagaacaatcccaaaattcaagttcagttgtattattatctaaaaatagttcaacagttttattattaagagaacgatttttggctaaaattctacaaattttcattttattatgattaccaatttcacctaatgcattaacatgatcaatattttcagtaataacatgaatacaaaagtcttgtaatgaaggtagcttaaattgttttttatctaacaaagcagcagcaatcttctttcttcttttcctagcttcaatttcatgttttttagccaatctttctcttctaatttgaattttagaacatgatggacataagtaaccaacgcgtcccgatttttcaatcttctttgaatatggtgtaactgtaaaattttgatcacattctgaacagaagaggttagtaccagtggtaggtgtataaggagaatcagttttctgtcttttgctatcattttccactacagtttgatcagtaatttcttcttcatcggaatcaagggcaaaatttaatgcaatatgggtatcattatttttattaatattattattgttatcatcattattattattaccatcatcggatccattaactggaatattattagctgtatcatcattagcagcttctaatgcctgtgattgttcatatctttgtctaatttgttcagcattaataccttgttcacgtaaaaaagatgttaaagcacttgaaggtcccttaacaccaccaccatcatcaccatccagtggttgtcctctccttctacggaaacccattttccacttatctataacctctaaagaaaggaattcagagaagaaagaagtgaaataaaagctgataaaaagaaaagacctgaatgaaatttcatgttaagccccacgacccctatttttgttgcatggcccatataatgattgttgttactgtacaacttggtatacaagaataaaactgtctcttcttcaacaacgtatgttctatgtgtgatatagaggtttatcactctataatacacctattcactaacccactatttacagtcccaaaaataaaatcaatgccagcatgttgttatcagtaacggaacattaaaattcccaataatcggcggcccgaatccactccccagtgggaaaagcgaatgttttgataaggaatacattaatatagccattcaaagatcgaatcatcgcttcatctgctttgtttacctgattcaatcggagtaccgacttttataccccttgaaattcccttggactggcttgctagttattgcatcatacaaatttttcatggaaggttaaaataaaaaggttgaataatacagatctattcgaaattttcatcatatcagcataatacatagcatattatatacaggagaactaatgaagaatcaattttttaaaggaatataccaaagacatggtgcattcaatctttatttacttgcattcttactttcaatatcagcatgcctatcattaggtatattgacattgttctccatatttgcagaaccattacaaaaaataatgggatattcacaatcaactataaataatacaattatctttcaagttcttgggttaaatctatttacacctctaagtgggtatattgcagatgctgaaggtatttggattttatcaattatttcattttttggttatttcattggttttaatacaattataatgtcaattaataataatcttgataagaaatacatttatctaagtttctttatcattggatgctcacatatatcatttttgtttggatgtttactaaattctgctaaaactttagggagatattatagaacaatggctataagtacaccaaatatgatggttgcattttcatcctatattcaaatacaaatattgaaaaaatatttccaaccaattgataatgatattgttaatgttaaatctaattttatcagtttattgaaattttttatgataactttaatgatttcatcatttatttcattttttgcatgtaaattaactgacattatagaatattatgaatttgatgaagaacaaattgacaattccaatcatgaaagttttttgagttttgaaacttcaccattattaattggtgcaggaactgttttacatagtcctgaaaattcaattattggttcacctagaagttggtatgatggtgaaaattctccaatgctgaatttagatgatgaattatcattattatcatcagaatcaattaatcaatcagttccaacatctgatggtatacttagaataatgagctcatttcacgaattaactccttataaaatcaaggttagaaattttttgagtgatcctttaatgtatccattacttatgtgttgtttaatatcaattggttcaactgaatttttcattgcaaatttaaatacaattttaacaaatttaaatctaagtaattatttagattcaaatttacaattattatcaatttgttcaacaataacaagatttatcattatgatttttacagattatatctgtacaagatttcaaatttcaagaattacaatctttacattaagtgttataatatgtggaatttcacatatttatttatcaagtatacccgttacctcaattaattttcaatttgtaatgattatgaattcaattttaaattcagcagttttcacattattccctgcaattttagcaagtatttatggtatagagattttaggaacaacatgggggttatgttcaagttcaagtatttttggtaatatgtgtttaaatttaatgtattcaattgattttagttcacattgtgttggtaattattcaaatgatttagtgatttgctcaacactaacatttttcattagtggatcatgtttgatacttttcggatttatagttttcttactacgccaaaggtatttacacaaatcctctgcatttttttaaaatagattagattagattagattaaactagatcatcaattttaagttttttatatagatcttaatgattaatgattaaagatagtactaagataatctgtgtactgtattacgtaatctgatgtattgatttttttaaccttagaaattcttatcgttctttttttagttgcattgctgatctgaaggcttttgatactattaattttatttattttattgtattacccctggttagtattacacttattacacctgcaaagatactcctaatagttacaaaacttaacatgtctgcagtgtcagatccaatcgaacaatcgaataatgcaagattattatcaatagacgaatcaatagagaggtctactacaacaaatatcaacgccaccagtacggaaatagaaaataatgataatacaattgtggtaaatgatgagaatagaatacgaaacaatacacatataacattgccgacagtgaatgaagaaacagttagaaatattgatggaactatagaaacaattacacaacaagaagttgaggaaccatattggcatgatgataaattattcaatgaatgtcaagaatgtggtattaaattttcatttttcattagaagacatcattgtaggaaatgtggtaaaatttattgtaataaatgttgtgggaaatattgtaaatatattccaggtagttatgttattgaagaatctggtaatgaaggtaaaaaattagttagtggtatgtataaatatttagaatttaggacatgtgattcatgttatgaagaaattaggatgttgaaagaagcattagggataatagaagaacgagatgagaatagagaagatcacaatgaaactgatgacagtgatgatggagaaggtgatagggatgatatagatgaaactaattcaaatgtagatacgataaatggtattaaacattcagaaccaagggagattacgatggaaattagcgaagtctagagctggtacggaaagtattgaattaggtaaagttgaatgtcccaatttgtggaatagatatagggagaaaaacctgaatctgaaagggagagacatattagtcaatgtttaacggaacatgaatttggatcaccgaatacgaataagggaggaggaggaaccgaaggtggaataaccggtagacgcgataagaacagaatgatagtgtataagttagaagataaggataataaacttgatagtgaagatattgaagaatgtgttatatgtcttgaagatattgaaccaggggatgttgtcggtagactagaatgtttatgttgtttccattataaatgtattaaagactggattaaccgaaagggagtatgtgaatgtcctgtccactcacttatttgatgatgatgattaatatataaatatagcctttgccaaggatcttaattaaaccaaaagaggaaataaaataaagtatatcaatttaattaattaaagtttacattatactctcagtataactaaaaattagtgcaaaattagtcaaatttaccagcctcccccagtggaatgtctattttacccatgaatgggtttatcggctactcccagtattttcccaagataagaaatttcgcgtttaataaatataatagggatcgtccaggaaaaaggagaaaaggtttagtacacgtaagattttcatattaaggtttggtgttttcaaggagaattgatatagttttttttttcagggggttatttcatttatgccaattatatcaagttttactattattattatttacgggtattaattaattcaaagtacataattcaagtttaacttagacgatgtcgtgcaactaatatggcctattttatttcgttctgcttgatctgttttaaatttttctttttactctttttatcttcttttacaatcttaactctcattgcttatcacttcaatcaatataaactaatcatggaatcattatggctggatgatcatggatcaaatacttcaattacttcttcaaatactttaaaagctttaaataaattacagagtgaaaaatttcaaagggggttgaacaaatttattaaagcatttgataacaataatagtaatgctactaccaatgaaatagctaataaaaagaaatttggtaacttggtaatttcaaatcctatatcctttacacatgtatctcatgtggatccaaattttacatttggagttgaaaaatcatttaatagtgttgatccaaatacactaaataacttattaccaataacgagacaacaaaaatatgaggaagaaatacaagtgtttgacgaaataactaataataatagtaataataatgatgatgatgatgatgacaatgacgttgatgaaattaatgaaactcagcaaactacattagatccaggacttaataaaattcaagcattttcatcatttagaacaagtccaacagttaatttactacactcacattccaaatcaagttcaataaattatcatcataaaagaaatagttcatgttcaacatcactaaatatatcaaatgaatcaacatttactaaaagaactagttattctgataattcattaatttcatcaactggttcattgaaaaaatatacattaccatgtataccattaaatgaagtagaggttgagcttgaaaaggacgttatccctgataataaagaattatcatcatcagagaatgatgatgaatttgtttttaaatttaaatcaataccatcagcacctccaccaccaatggaaattctagaacctgtggaaagattaaaatcaattatacaaaaatttgaagatattgaaattgcatcagattctgaagatgatgaaacttttacaccattaacaaaatttgatatatcatctgatttattaaatgataataagagtaccaataataatagatgtgttaataatagaaataataacaataaaaaataataataataaaatagaaattcaataatacagttatttgaagatgaaaaagatagtgaatatcttatgaatttactggaaaaatcacaagtttcattgcaagataattttgcgataaagagacaatcaattttaaatgttatattatcagaaataaccgaggaaccagaaaatgatgctgatgatgaaattgaagatgaaaatgaagacaatataagaaattgtgttgctactacattagatgttgttgctgaggatagagatgaagatgaagatcaaacttgtttcataggtaaatctccaattacgtcagatttttttagtgacattgaactatcagatgttgaaaatgaaaacaatatatttgcagatattgatgaattattctgataagttctagacaacaaataaatttttatattagcttttaccaaattgtatattttctccatgtatttttataaaccccataaacaatcatttctactatattaaagtagttattttataataagtaaactcgggctttagataacgaaacaactaaatttttgaacttcgcaatatgaatacgaaagagatttcccatctgctgatctaacttctttttatagtagttcctcatatgcatatatagacaacatggttgatcagatgatggtagctaatgcatatcatgaatataattgtgcatatgataaattatatgaatcattaagaaaatcacaaaatttattaaataaaggatttttatcattaaaattaactgaacgtgatgaaattaaatactcattaattgatacaaaacgtaaatcattaatcaatgttcgaattaatgaagatgatgtggataataaaggtgaatttgtaattgatattcaaagtacgttaaatgatgttaaagagaaggaaacagaaaatgacgataatttacataaacgaataggtaaaaatggaattgatgatgataatgaaaattaatgaaattaaagaatctatagaggtaattgatccaattaaacttatacatggaggttttacctcattaagtattaaacaatcacagaaagagagtaaagatgtgataattaaaattattgatgtaattaataaaagacaaaatttgcaaaatttattagatgaatgtaacgatagtattatatagtatagaatgaatgaattaataataaaataaattaatcagaattacttcttttaattgcatcttgaactaattgattaaaattagcatttaatgaacaataactttgaactgaaccaattataactaatgcaattgttgaaccaaaccataaaccaattaaaccacttggattttctttatttggtaaacaaaatgccatataagcacctaatggtaaaccaattaaataatatgaaattaaattaacataacctccaattttttgtaaaccctgacctcttaaacaacctgcactaattgaatttaatgcatcaaaaatttgcataaatgctaaatatgggaatgtttcaactgcataatgaataacttcttgatcatttgtaaaccaattaataattaattttctaccaaaatataggaatgatgaattaaaaattgcaattacagctgtgaaaatgaataatgttttacaagttgtaaaagcagaatttggtaattgagcacctaagaaattagcaattctagttgataaagcaattgaaacaccataaggaatttgataattaagtgatgccattgttgctaaaattgattgagcagctaattgagttgtaccaagataacttgctaataaagttaaaatttcaaatgataaaaattcagacataatcataattaaatttggaattgataatttaattaaactaccccaattacgtattactttctttgaatcaaattttgtccaacattttaaagggtttaatttatttttagttttaacagtgtataagtataatccgaatgccattaaagtataattaatactaacagcaattggagcaccaatataaccaaagttgaaaacccaaaccaataaataatttaaagctgcattaagtggagcacaaacaaataagacataagttgaagcatcgaagataccttgactttgtaagaatcttttaccagtttcaaataagatataaccaggtataccaaaaggatgtaacttttaaatattgagcagcataaattgcggattgtttatcaggtaagaaatgagttaaaactgattcatgcccaaatccaccaagatatacaaacaaagaacatgattgtgaaaattaatactgcacatctttggaaaataagaccaactaaatgatattttttagcaccataagcttgaggtaagaaagtatccaatgaagaagctaaaccagcaattgttgcaattgcagttatatttgaagtcattgcaccaagagttataccagctaaagcttcagatgatatatgaccaactgcaaaaattgaacaaacagataaagaattttgtaataggaaagtaataattaaaggaaatgaagatcttgaaaccgattttaattcaaatgagatagaagttttaattttaccatttttaacagcttcatcccaagattcaataattgcatcttcatcaattatttcattttcatcatcaaaattattactattattagtgttattactattagttattacttattattgatggtaatattggagtattttcattagcaataattgaagaacaagtacttgaatgtttaataggtatatgattttcctttaataaacttgcttcttcagataaaagtaaatgaggatttgccctaatagtagtcataatcattattactattattgatattatttaaatctgtatcatcaggtacctaactctaaatctgctgcatcatcatcattatctgagacagtattatcattatgatcatcatcatccattgattgtaatacattttctatacgatttttatcataaggatataaaatcttgaggaacaaataaacctgctctacctagagaactagacaccatagaagcagaagctcttctctgtgcattagtgtgagagaattgcaaggaagctgatttacgagagtccatttaccttgtgaagaaaggaagatataagataaaatcattcttccaaacagattaaaagcaactatactaatattcatgtagagaaaagaattaaatagagaagacctgaataaatggcagtatagagacggcgaccgtgttctctataaaaggaactgtcagcgctgcttttttaggggaaagaaaattttttttttctctcttttctaattttattactgcttggacagtttcaaggattagtataatctaatgaccaagtcaattgtcttcaatttggtctcctcgtcttaatgagaaagtgtaaagtctttgttggtaactcccatcctcaattaggtaacttagtttgtcaaaatttaggtattgaacctgctccttgcactttgaaaaaatttgctaatggtgaaacttcagttcaaattggtgtatcagttagagatgaagatgtttatattattcaatcaggttctccagatgttaatgatcatataatggaattattaattttaatttcatgcttgtaaaggtggttcagctgctaaaattactgcagttatacctcaattccttattcaaaacaatcaaaaatgaaaaagcatagaggtgcaattactgctagaatgttagctaatttattagttatggcaggtgctgatcatgttgtttcaatggatttacatgcttctcaaatgcaagggttttttttcaaaacctgttgataatttatatgctggtccaactttagctaaatggattaaagaaaatataaataattatcaaaatgctgttgttgtttctaaaaatccaggtggtactaaaagagttacagctttagctgataaattgaaaattaattttgcaatgattcatactgatagaagaagaactgctgataattttaatggtttaatgaaacataataataatagtatagttaaaaatttagatccttctccacctccaactccatctcttaatattgataataatgataacagtgataatatcgattcaactgaaattcaaactgctagaatcgttaaaggtcatgttcttgatgatattaatcataataatgaatcattatcattatcaccaccaaaatcaaaacctttacatcacaaagaatcagaattaaattttgaaaatgataattcagatgatgaagatgaacctgaatttaatgctgaagaaaaattaattactttagttggtaatgttcaaaatcgtcccgcaattattgttgatgatatgattgataaacactacatcctttattgccgctgctgaacatttaagaatgaattgtggtgctaatagttgttatattgttgcaactcatggtattttcaataatgaatgtcttgaaagattaaatgaatgtccttatatcgatggtattattgttacaaatacttatccaatatcagaagatgcaatgaaatcttgtcaaaaattaactgttataaatgtttctcaaatctttgctgaatgtattagaagagatcattttggtgaatcaattagtgttttatttgattcattagctgcaattgaataattttttcttcaatatcatatcctatacataacataacataacatattacaatttttccaattttcaattcaatctcattcataatcatatcacataatttcaatttcaattatatatatgttatttctttttatacacatacataactttttaacggcgtttctttctagttcgccactttccgtggctgaacatatttcaatgacgcagtcagagggctgcagtgcttaaattcctatattagaatttatagcattaacggagcattgaaatattaatctcttccgattacctaactttttgtttctggccaatagattatgcttcaactatttgttcggatggttattaggtgaatatttcgtaatttgtaatcatgtaattgtaactaaaaaaaataaaagatatgccttactcatcaaaatttattattataaaaaaccttatacaaaaactatcttatggtttactatcatccaaaggacttgaaatattaacaggtgtaaatttctttggtaatgaaacccttgaaaatctactctttaatttttgttgaactaaatccatatctaaatgtcttgttaaattaattcttctaatacatgaaatataatgtttatcatctaattcaacatctaatggatcttgtgtagtgacatccaggacttaatgataatctaattgaatgtttcttatgtacctgttacactaacactttcataaagttcaaaaacaatttgtgataaataatctaattctggtaatgcattacgtgcaatcttcattggaacattactctcatataatatatttaataatgtataaatatgtgattctttagtaaaataaactcttgtacctgccttattagtttctttaatctctgttatatcctttaatatttgtttagctaatggtaatgtagttaataatccaatatccagcttttcattatcttcaataccatattcctgtggacaaataaaatcaaataaaacttttgctaatctataaagttctcttaataaattatatttagcatcatcaaatggtgattgtttaccttgttgaccttgacttttatgttttgaacaaagatgtgatgatgataaaacccaaccaattgaacctgcaggattactattattactattttcagctgatgatgttgaagttgcatctaatgatgattcattaactttaaaatcattcatcgctaaaatattaattggatattgattcactaatgatcctgctaattcagtttcttcctcacttgtaattccttcttcattatcaccattatcctttctaatgaaaattttctgtaaaaattctctattatgtaaagcatcatatttcattgtatcatataattcactaattttagatggatgaactttttcaacagtgacaaattcttgaaataatttatcccatctttccttaaataaaaatggatcttcatgacaacaccaaaattcttgaaatttatcaacatcttgagttttaaaattttcatccattattttatgatgataattcattaattcaacaactcttttaataacaataaaaggttctggcatttttggtggccatgcaaattgtggtggtgcctctttaccttgtcttaatagaggttttaatttctttttaacttgatccattaaatcttttgcagcgtttgaatcatctaataaatcttttctaactttaaggaaatcatcaggtaattcatcttcacataaaaatgattttgaaaatagttgtgcacttgcaacaactcttctctctgatgatgtgaaaactctaacatcatctaatgcagctttatttaataattgaatatcttgacggaattgttcaccaacatctgttgcttgataacgtgcagaatgtgttggttctccaccccattttaaaattaattgaactttctcaatttcatcagtttcctttattcagtgcaggttttaattgaattttagtaccagggaatgtcatctttctctctaatgcactctctaatgtttttaattttttggcatcttcaagtttcttttcaattgcaactttaatagtttgtaaaacaacatttaaatctcttacttctctaataataatttcttctttataacctttcataagtgaaatgaaaattggtgatttaaaagaatatttaaatttttgctttggagttctatctgcgtgtctaataactgaaacaaaacctttgaaaacccatttttgagatttttcatgaactggaattggtaaattatttttatttctaatagtaattgcttgtaagaatttagatcttaatatacttgcagttgtatcataataatctttattatctttaacaaatgaaaatccattaacatcaataacataacttttaccattagttctcaacaagtcaaaaccacagatagtttgttcaaaatatttagtaactttacgagcaatttcaacttcttcatcagataattcagttggatatctaacttctttaccttgtgtatttcttctaacaataccatcaacaacaggtgattttctagtttctgcatgacaaaaatcctgtccaacagtataagctttaacatcttcaaaattatcagtatcaataaattgttcatagatatatgaaccagtagttctaatttcatttaaatttggatcgaattcacttgatttattaccaatttttctaaataatcttctaccaccaccaccatttttctttgaataataaatattaacattatgatcttcaccatcaacaggtttttcaacaaatggttttttaataatttgaccatcaactaataaagtatcatcatctaacatttcccatttagattcttcaacttcatcacaagttaatacctaaattttctaattttttccttaattcatcatcaacttgaggtccaccatctctcgaaataactaatctataaggagttggtacaccagcagctttcaggatttctaaacataatcttctatcccataaggctttttgcataactaaatcatttaaacaataaggtttccttaatttttcataagcaattgccttttcaagtgggaaaccatttgaaaagaaagatataaggaaatcacaagttggccaattttcaacagcttcatcaaggataactttatcaccaaagataacagtatcaaattcatcccttgcaattaatctttgtaaaatttgtctacagggttttgataaaactttattatccattgcacaaacaccaattgtaccaattttaggtaattttggaccagtatattgttcagtaattgaagaatttgataatgatcttgattttaaacttgaagagaatgattcagatgatgaaagatttcttgatgatgtaatttcttctttactacttgaagtactaattggttgtttttcatcattcgatatttcaggtgatgatttttttggtgaatttgatgccttgatagaagatgctgtaacattttcattatttgtagtagtagtggtgttgaatgttagcatttgattcattatcaatactttctttgctaatatcgttcatgttcattagtagaatcaattatattattattattattattattattattattattattattatcaatattattatcaatgttattattattagtattattattatgagtattagtattcttatcattagcatcaataaccaaagttgtattagaacattctctttcatcggaaagacttcttctcttttcaccatcatcagcactacttaatgcagatgaaggttgatgatgattaatacttaacgcacttacatttgatacagttcttgataaagcatcttgacttggagagacaatttcagattttgataatacaggtacaaaagtcttctaaaattggagcaattgaagcaatagctctcttatgataatctaaagcttcacgagttaaaggatttggatctgcatcatatttttcttcctcttcaagaagtgaatcattatcgataatttcagaatcaattgacatatttgaaagatttgataaagctctctgaggaactgttctctctatattttcgtcagtggaaatagaattgatagagcctaggcattataaactataataaaagaagttgtaataatgacacacccttccttatcttaaataataaaattaaaattaaaaataaaaccttctttaactttaactttaactttaactttaacctgtaatcaatgtcaattacagtcttctctccctaataatagaaaacgtggtatatagtatagttaaaagagatcctactcttcccaatgcggtaaggtgtgccgagagtggaagattttcagatggaatttcccttttcggaacactacatgatttttccaattaaaatttttttttctgaatttttcactttgtaattcttttttgtttttcttttaattcgtttcacatatcacatgccaactgcaatgtctgtcgctgaggttaagagacagaagggtgaaaataaggctcttgaaaaagtgcgtaaatcaaagattttctctccttttagaacaattggtcatgtctcaagtaatattccttatagcaatcggtactttaggtgcaactttctatattgtcacaattcattgatagatcattccaaatctatgatgcttctactttacacttactctttgtttctagtaaacaaactccagttccaatttcttgtgtaactgcacgttctcattatgtttattgtgcttatggtgataaaattggtatttcaagaagaggtagattagaatatgaaattcaagttccaaatccgaaaaatgataaatttttcaaaattaataaattattagtatttaatgcttatcttattgcttgtactgatgatgaagtttacgtttttgaaaataaagaaccaaatgataaattcccaactgttttctatacttctttcaaaattagtaaattatatggtaaaattgttgatatgattcatatgccaacttatcttaataaaatcattattgcaacttctaaaaatttattagttttcaatgttaaaacaggtaaaaatgttttcataactgaagaatttactgaatcaattacaactatttgtgcagctcctgttattaatttccttgcaattggtacctctgaaggtgtattcaaaatttataatatcaaaaaggctaaaactttgaaaactgtctcagttggtgtcaactctttaattacttcaatgtcttttagaactgatggttctcctcatattgtttgttcattgactaatggtgatttattcttttatgatttaaataaaaattcaagagttcatgttttatcaaatgttcataaagaagaatttggtggtgtctctaaagttcaattccttaatggtaatccaattttagttacttcaggtggtgataattcattaaaagaatttgttttcgatcctgttttatctgaaactaattcatcaattgtaaatcctccaagacatttaagatcaagaggtggtcattcagctcctccaagttcaatccttttcagtgatgaaaatgcacattttatggcatcaggttcattagatagaacattttggttattctcattacgtaaagatgcacaatcacaggaaatgtcacaaaaggaaagtaaagttaaaaatggtaaattacaaggtggtatgacaaataaatttaaacaaaaattcccaccaattatttcaattgttcaagaaaatagtagagcaaatgattgggataactattttaactgctcatcaagatgaaacatttgcaagaacttggacttcaaagaataaaaaattagggtaaacataaattaaatacaattgatgaaggtttagttaaatcaatcgcaattagtcaatgtggtaattttggttttgttggtagtaataatggtggtattggtgtatataatttacaaagtggtatatttaagaaaaaaatataaattacataaaaaatcagttacaggtattgcattagatggtatgaatagaaaaatggtttcatgtggtttagacggtattgtcggattttatgatttttcagaaagtaaatatttaggtaaattaacatttgattcaccaattacaagtttatgttatcatagatcaagtgatttatttgcaattgcattggatgatttaacaattgttatcattgatgcagtttcacaaaaaattgttagacaattatttggtcatacaaatagaattacttcaatggatttttcaaatgatggtagatggttagtttcttcctcattagattcaactataagaacttgggatttaccaacaggttcatgtattgatggtattaaattacctaaaattgcaactaatgttaaaatgtcaccaaatggtgaatatttagcaaccacccatgttaatgatgttggtatttcattatggacaaataaatcacaattcaagaaaatttcaacaaaacatatcgaaagtgaagaagaatttgcaaatattttattaccaaatgttagtggtgaaggtggtgcaagtttaattgatggtgcatttgataatgatgaagttgatttagatgaaggtatctatatttcaccagaatctttaagtgatgaacttattacattctcaaataattctagaaataagtttaattcaattatttatcttgaatcaattaaattaagaaataaaacaaaggaagctccaaagaaacaagaaaacttaccattcttccttgaattaacaggtttgaaagttggtaatagtgcaattgaaaatgaattaggtaaagatgcagttaataaattaagtgaacaacaatcgaatactaataatgaaggttccaaattgattaatttggataaatcaaaggaataccaattcgaaaccgaatttactaaattattaagattacaaaaattcaatgaatttattaaattagttgttgaaatgtctccatctaccttagattttgaaattaaatcattatcatttaccccaccatatactgaaattattaatttctttgaagctatcaaagttggattaaaatctaatggaaactttgaaattttggttgcaattatctttgttttcttacaatcacatgctgatgttgtttatggtataaagaaattagctaaagatgatgacgaagatgcacaaaatgttgttaataaaattaatgaattccagaaagttaacttagatattgttgaaaaattagatgaactcactaaatattgttccagtgtggttaattttatcacaactacttagttttatttctatttttataaacttttatataaattctatttatccttagaacatttgtaatgtaataatctaccatctgggtggaaacaaattatttcagaattactaaaagttctaccacatttagcacatacactattataattcaactttaccattttctcttcaagattcattttatctaatttcatattaattacattaactttaagtaattcattcttaataattaaattatgactcaatgtatttaaatttttcagattcataattaaaaatgatgacattaatcccattgatatctcatttggtaacttaatcaaaatttcttcaaaatcaacaaatgttaattcggtattgtttaaaatatgtttagttatacttgtataatctttattttgtaaacatatatctaatattttaaagatcagtcctttacataaactcaaccctttaatatctttaatacgtagagcaaattctattgaggattccacatcgtttaaatcatgaatataaataccaagtacatcatcatacttacccaacttcattaatggttgaattgataatcgtttggaattttctgaaactgggagttctttaagtttgttaagtatcatattggaattgtagttccctaaactgtaaagattttcaattttttcgtaattagcatcaacgtcaagaaaataataatcaaataacctatttgttatatctgacactgtaacatgttcatgaaatataaggtattctaaatacaaaataatgtatgtggtaaggttatgtttttccaactgttttaagatttctttatagtttaaatttgaataatcaaaataatcatttaagaatattgatttgaaattttcttctgataatgaatcatcgtttttgactataatatattttaaattatcaaatattaaatttatcggaggatcatcattttgaataagtttctgtaaaaataacactagttcattaattttattggatcttattaataaagatatagaactctgataatctttcctagtataataaaatgtagataattgatcatagagatctaatgactgacatgaattttcaactaactgaaaatcacaataattttgtattctcaaaaaaggattaatcatcttgatattaacaaataagtaacatttaaacagataagtatctattaatttcaaacattccataattgagaaattttcatcgctttgatatatggataatgatatctctaaattgttataggtaaacactgcatctttattttcttgaaatttaatgattttccttctggaatctgttaaataattaatcaatctatttaattgatgtcgaatcaatggtgataaatcgggtatgtattctattctatcgaaatcaaacaatatttgtaaattttcaggtaggttatcaataacttgatttggtgatgcaagatattctataaataaatcaaaagcttggtcaaaatcttcatttatcagtgaaatagccttttgtaatttaaattttcgtattttaataaactttaactgttttaaatttattttatcattcttagtatccttactattattgataaattttgtaatgttgagattctctaataaaagtatagcattatcaaaatcatttaattcatctaattttgccaatatcttattatagtttaacaagtcatatgacaatactttgtccttagttaatacgaacaataaatcatctgaaaaatccagttgtattattgaattttgctttattgtttgaaacaattggaaattttgtatacttcttacttcaatgaatgaatcatatatgatgaaaatgaaaggaaaatgaatttgtgaatatttaaaatttgattgttctatttcaattgagagattagatttaaatttggggtatgaaatgttgataaatttaatgtattcgacaaatatcaattgattattaaaatatgagaggctagacaattgattataatttttatatgatattatctttttctttaaatttagatatttttgtagattatgatgtttaactttagctgattttaaattaatatgaatcaaatcattttcattagttgatgacatacatactaattcattattttttaaaaattgaataaatttaacttctgttatatacagattgtatctatcgatataatcagaatttgaccatttcaatatgattatttgagaatccgatacaattgccaaaaacgatattaatgaattattcttttcattagtttcatcatcattataatcagttttaacaattgtagttgccaatgacattgaatctgaatttgaatcatttgaaaccatatgtgaagtatgtaagttattccaaatatgtaattttgtagattgtatataaataacttgatcattttttttatttgaaattgataaatgtcgtatcactacacaatcatcatattgaatgactaatacattgatatatggtaataattgtatatctttaataggtttttgaatatcgtgctcaattgattcattctttgaaatttgagcattttgtggattatagttataaattgaattatgagaagcaattaaagttatatcatccgatgaactaattgcaattggtctctctggaaatggtattaggatcattatgttgtgtaaacaattcaatcattgcagttcattgaaaagaaacaaatgaaaaagaagatggtgatataataatagtgataattgataaattatatgataataaaaaccgtttacgtgcgatatcgcctatataatattacgaaaagacagcttttctttattattattatttgtaccatcttttagtatcagattggaatggacttagatggtaagatacagaaacggatagctgaaggagaagccaaacgattggttaacattgaattacgagagaaatatcgtagagttttaagacgtacattaaatggatttgatagtgatggaggacaaagtattgtttatgagaatgatataatgattgataaatttgagaaagaattggttaatcatgtaatgaatatggataagaggagtaaagaattaaagaaaatagttaaaaagatggatgataagataaataagtttgatataagtagtatacaacaaagaactgaggtattgaatcaacagataagaattttagaagttacaatgaaatacattaaaaattagtaaagattatattattatatcatatcatattgtactatataaatataaatataaatgtggatctggaatatggggatatgacgaaagagcatgataattagggtagcaaaaagattagcaaaagaggtattaatgaaatgaaaattaataatattgttaaaatgatattaatgttaggggacaccaccatttttaactctttcaaacatattatcattatcccaaccaatataaatacatttaatagcttcagataaatttataccctttttaagaggtttaccataaacaattaaatttttgtaaacatttaaataaacttcatcatttgtttgagcaatttcagctaaatgtttatcatttttacgttttgttaattgatttagaggtattgttggtttaagccattcagatctatttatttcccacatttctgcaccagttggaggtggaggtggaggtggagctgaagttagagattttatattatttgatatagatatattatcatttttaatatctgaatgaacagtttctgaacttttaacactatttggacttgtaaaagtaccaccattagcggtataaggggtatcagtgggagttgtattctttaaaatttttatatttaataaattttgtgattcctttttcagtacttcaatataatcagtttcttcatcagattcgtttgaatcaaataaatcatcaacttgatgatcaacatcattatgttgtaaaactgctgatgatatttgctttaatgaattcattgcatctttaagtctattccctatagatcgtttatgtttaattgtatttgtcattatttatttaaaaaaaagagcttcagtgtattatagtgtattatgatatattatattagctgtcgtgtgttattaaatgtattatacaaaagtccagcaacaagagtattgcctgatggtcagggcttaatattgcagatttattaattaagtttcaacttaaattatctttattacgtaagttgttatctctctttataaagtgtattactaacagttatagagtattagagtttctagaccaatatattgaatcaattgaaatagatacaccatcatgagttgaattagtccaggatctactattataattattacgaaatttaccaatatatttattaagagttggtaaaattcttaatctaactatcaattcatcacttattcgttgattatcattggaatttgaattaatattaaaattaaaatttttaatagttgaaacaacgggattattattaccaaaaggatcatttgaatgtaaaatacctgaatgaaataaaattgcaattatatcactatcatcagtataaatatctgtaccccataatgatctattaagtacattttcattattatatagagaataacttggtattttaatatcaattgtataatttatatatttagaaatgaagtttggtaataatgtattggaattatgaatatatgaatgagtattggtattaatatcagtatcagtattatcaagatttataaaattagctgaataattatttggtgatggatgttctgtatagtttatataacctaaatgttttgaaggtagtgaattgcattgagaatgtattttctctattaatgattgtgattgtgatgatacttctgttgtcattgtatggttggataaaaggaaagaataataccatataacaaataaaagagaataaaataccatataataataccataataatgttcagcctccataaccctcttcaaacaaaccctcccatccacacacgtgacacacccctccctccacacacacagtcacacaaacagccaaaaccccgcgcgcaaaagaaaaaaagcaagtgaaaaattccaaaaaatccaaaaaaaatgaaaaaaaaaatttctgaaaaaaaaaggggaaattccaccgcaaacgaggataccaccttaaccagatttgaaaatttcaaaattaaatctttactgcaatatctcaattctctctatcttttccgatttttcacctttacttactatctctctcgatttttacttagtattgtattttcttgtattatttcactgaaatttattgaaatttatttaatatttcactgtattttataatttattaattattttttacatattatattacatttcttaagttaagtttatcttccttgaaaatatacctcaataaataacaatggctaaggaattaaaggacgcagttactagagaatatactattaacttacataaaagacttcatggtgttactttcaaaaagagagcaccaaaggctgttaaagaaattaagaaatttgcaaaattacatatgggtactgaagatgttagattagatccaaaattaaatgttgaattatggaaaagaggtattcaaggtgtcccattcagattaagattaagaatttcaagaaagagaaatgaagatgaaaatgctaaatcaactatgttctcttacgttgaatccgttaatgttccaactgctaaaggtttacaaactgttgttgttgaagatgatgaatagattattttaatttaatttttatttataaatataaataaatatagtcttttatttctaatgctacataattaaataataaacataaactttaacctatcttgtagtattagtatagtatatgacactaagtaatagctataacagtaaccgaaagattaaaacataaaaaataccaaatacttaactgagagtgaaatttacaacaattcatagtaatatcacgatctacattacattacatacaaaactacactacataatacataataaataaaaatactagaaatcagtgtaactatgacaaatgtacctatcattataactagcccgcgtataatcatattcaaaacgaatattaactatactatttaggaatacaagtgctaactcatatctcattcataatttggtacgattaaaaaagttatttcatcatttatctagtaattaaattacttaatggtatacacttataccaattaatcattgtccattggaagtatgaagataatattgcagaaccacaaataggacatctcacactatttatacaaaaaaaatttaaattttcgagtattttaagggtttcttataaaagctatctattaaatacttataaatttgctaaattactacgattttctctaattggtacactaacacctaatccaaaacctttatcacctggtctctttaattcaaaattattatcaaaccattctaataatgaaattaaatctgaacattcatttaattcaatatgtaatttacgtttaattaaaccttccatcatacatgataaatgatgttgaattaatttaaattgtaatccataacttgttgaataatcccaaaatttttcaattgcaccccatggacatttttcatatcctgcaaataatgcaggattatttaatataccacgtactgccataactccatcacaatttgtaaaattttgaattttactaacatcatcaattgtaaaacaatcaccatttgcaattattggaactcttgcaatttctttaattttcttaattttatctaaattaacgggttgactactacgtgtatttttggtacgtccatgaactgttataaaatcaactcctgcatcttcaaccattttaacaaattcaatagtttcattaatatcatcatgaactctaatttttgtttcaatacaaattttatccccccatttttcctttactgcaaaaaccatttgtgaaactaattctttattattcattaatgctgctccaataccttctctaacttgttccttaattggacaaccacaattaagtccaattccatcaacatatggatgaatcatttcaacacatcttaataaatcagttacattattaacaccaagttgaacaattaatgatctatcatcattatttgttgtaaaatcactaattctagcttgtttattcctaacaaattctcttgctaaaatcattggtgaataaacaatatcaacattataatttcttaataattgtctaaatggtaatttactatatcgtaccattggacctgcaataagtactggtctattctccatttgacattttttaattatattaataggtttatcctcttctcttctaggttttaaatctctcatattgggtattatattactcatccttagtttgcttttcataaattactgataagactactgataagaaaggaaaacagtctcttttaaatggaaaacagttggaaatttcatctttaaagaagaattttttttgacacatccattggtagcttgcaccttcccttttaggcagttgggtcctttgctgataagagattggtgtttcattggatgtgttgtcttatcttttatgtgggttttctgtgtgttgtatatttatagtgtaagcttatttcaattatacgtgtagtattgtaatagacagttgtacctatactatatcaacgctacactttcctaattgagtctcgaaatttttcactaagcttaaaatttttttttgaaagagtaaccatgtagaaattaaacctggttttataaaacaataagagtttttttactggtcaaatgacagaggaatcacttaaaagacctttagaatcaacatcagattcaacttcagatattaataataccaatgatgagaataaaaaacttaaaactggggaattaaagggtgttgcagttattaaacctgaatttatagtgtcattaaataatgatgatgcaattgatgatgatttagctgaagattcaagagaaaataatgaagattctgttgcaactggtagtaataaagataaaaagaaaaatagaggtcaaaataaggcacgtaaattaattcaaattaaggaagaaatgaaaatttgtccttcaattattgatccacaatcaggtaaaatttgtattaaaggtagtgaatgtaattgggaacatgatattaaaaaatatttagatcaaaaggaaaaatgtattgaaggtcaatgtcctgtttggaatttattaggttattgtccaatgggtattaaatgtagatggttatcatcacattttaattatgaattaaatcaattaatttataaagaaaattatattcgtgatgataatagagaagaaattaatttaatttcaatggatgataaacgtttattatataaaaaaaaatttgatttcccaaatagtgaagtttcaattaaattggctgatgatgataaaatgaatagaatggatattgaaaataggaaaaaattagagaatgaatataaagaatttaaaattaaagcaagtgaaaagaaaaaattaaattataaaggtaaaaaagttttatctccattaacaactgttggtaatttaccatatagaagattaatgaaaactttaggtgcagatattacatttagtgaaatggcattatcaaattcacttattaatggacaaaattcagaatgggcattattaaaggcacataaaagtgaatatccaggttttggtgttcaaattgctgcatctaaaacatggcaagcatcaaaatctgctgaattaatttataaatttacaaataatgtaagtgaaattaatcttaactgtggttgtccaattgatttattatttaaaagaggtgaaggtagtgcattaatgggtaattcaaatagaatgaaaaatttattaaaagttatgaatgattgtagtggtgatataccaataactgttaaaatgagaatgggtattaatgataaaaagccaattgctgatgaaattgttaaaaaattattaaattctggtgatattggtgcaattacaattcatggtagatcaagacaacaaagatatacaaaggaagcaaattgggattatattgaaaatattggtaaaattgttaatgaatataatgaaaattttgaagaattaaaggatgttagtgataaaccaaatcctgtttatttaattggtaatggtgattgttatacatttgaagattataatgaacatattaatagaactggtattgatacagttatgattgcaagaggtgcattaattaaaccatggattttcgaagaaattgaatcacaacaatatttagataaatctgcaactgaaagattagaaataattaaaaattattctaattttgcattacaacattggggtacagatgaatttggtattaatacatcaagaagatttttatgtgaatttttatcatttacttatagatatttaccaattggtatattagataaattaccaccaaaattaaatgagagaccaccaaaatggagaggtagaaatgaattagagactttattaggttcaagtgattataaagattggattaaaattagtgaaatgttccttggtaaagcaaatgaaaatttctcatttataccaaaacataaaagtaattcatatgaaaattcaagaaattaataagtaattatatacagtatatatagaaatatcactacaatacttaatattcatcacttaaagcttttgatttttttaataaaacttccttttcatcctttaattgttgaattttttctaataaaactgaattatcaacattattattatcttttccactattttcaactttcactttagcaattttttctttaatttctaataattcgaaaaccattgaataagttctatttaaaattaatgataaaaataatgtaaaaccacaaagatacatatttctttgagaataaaatcttcttgattgaatttcagctctacttaaaccaccaccaatatttgaataatcattattaggatttggtaaaaatccatttaattcatttgaaattttatttgttctattaattgaatcaaggaacattataccaatgaaaacgaaaacacatttcataatcatttgaaattgttgtgaatgaaatggaattgataatgtatttaataatggacgacgtaattttgatggtaatggtaatgaaattaaagcaaataaaaccatttcaactattaataatgtgaatgtgagtacatattggaatgccattgtgattgtttgtagatagttagagaagaaaagaaagaaagaaaagaataaatgtgtaaaatttgagccttgaaatgatatttaaagatgacatgtccttaaaataaaaaatcatgtcagcgccttttaaggatatacgagtttatggtcttttattgaaagtattaagtattattattattattatataaatataaaataactattgtatattgtatatagcggcgaagataagtatacatattatgcggatgtatttgtttattcaattattgtaattattatcaatttagtaaagatttgttcataaagaaaagtgggacgtatattatttatttaaacattttatatatcaatgagttgtatgacctctatgatattttaaaccatttaaatttttataacgtttaccacaaacttcacatctataaggtttatccttttcaaataacattccatttggataaggagaatctgaatcaggatttataactgataatgtaccatcatcattttcacgtaatgtttgattttgatgtccatgaattctatgatattttaaaccattttgatttttataagttttatcacatccaataactggacattgaaatggtctatcctctgtttgttcaatgacatataaacttcttgcaggattatcaatataatttggattatttgaatcattaatattggtattatttgtattgttattattggtattattattattggtattattattattactaatatttatattacttgtattttcttccccttgactattatcatcaacttccatttcaaatggtgtatctaaatccatatccatatccatatctaaatcatgatgttgttgttgttgttgttgatgatgatgttgattatttaggtgttgagaattattattattattattgttgttattgttattattattagatttattaaaattgaaatttgacagtgtattttggatatcaatattatgattggtattttgattattgttattgttgttattgctattgttatttattatattatgattgttattattattattgttgttgttgttattattttgatcattaaaggataaatttaaattgaaattagataatttatcatcttttgtattaaaatcaaaaggtttattattatctaaattttgttttgtattaagatgattattaaggaaaacttcattagtttgaacagtttccattgtattcaaattaatattattcatattcatattcatatttaaattattattcatattcatattattgttgatattcatattgttaatattcatatgatttagatttgaattatcattagttatattatcgaaatcatttaataaatttggatcattattaatatgcatttcttcataatgttttaataaatcatgtaaagttggtaataattgaccacaacaagcataatctttacaataattagcttctaaatcagctaaataagaagaatttggaattgaagaatccattataacactatcatttcttaaatccattgcattattattattaaaattcccattaaataagttaattgattgatgtcttggttgattatttgtaatggtagtattgttctgattgtgaggctgattgccatttttagtactattattattattaatatgattattattaattaattgattttgatacatgaaaacttcatctctaagccaagaaccaacaccaacggatccccaagagataccacccataccttgagaatgagcaatactttccctccttaatttatttctatattgttgattaatatgatgtttatcaacttgttgttgttgctgttgttgatgaggattagcagttgatcttgcaaatgcaatattaataggttgaggattattacctgacatggtttatacgttagtgtagtatatttaaatactagaaatgttgattaaaagaagataaatcaagaataattaagaataattaagataaattaagataaattaagataaattaagataaattgaaattaaaatggcaaataatagcaatataataattaaacaataaatttattataataccgtcccttcgtcgcatcgtcgctggttgccctcccttttattttgataatacattacattacttacattacatcttaacagagccttcagttgatcttaaactgatcttgttcctttcttttggtatgcgtctgctctcccgtcgtcgtggtgggcagcgtgcctcagaggatattaatacacatcctcaaactcaaataccgtcaactccacctccaccacaacccaatcaacaactacaatcaaatccaaattcttcatctctaaaatcaatatcttcaatacccacaatttcttcaatatcaccccttatattctctaaaaataataccagcaacaacaataataataactcaaatacttccgaaacttcctataatacaattattaaaattttagaacattcattatcaaaatttaataatttaaagaaaaattcaccttcaagagctaatataatacgtttacatttattaccttatttacgttatcctccatacccttttacaaatataaatatcctactttcaacttctttaattgatcttaatattgattcattacatattttttcctcaattctaatatcttggtcaactgaattacttaatatgctcatattagattataatttaatatcttcattagataaaaattgttattttgaagctttatcaagattaatttctcataatatttggtttatttatcaattaaatttaaattattcctcacaattcacttcaatttatgaatcttatcggaaattattattgaaaactttccaattatcaattcaaagacttaattcaaaaaatatttctcaatcaatttcaatatttgttggtaaaatatttgccttctcattttatcatttaaatgatatttcaaaaggtttacttttcctattaaatacaaaattaataaattttaaaaaattaataaatactaatattgatccaacaatattaaatgatttatcttcaaaatttcctcctcatttatcaaatcttatacattcaaatcaatttatacgatcggttaattattcaattgaatctcatttcataaattcaatggtaccacctcgtgaaaaaattattggaattgatgatacaaaaggaatttgggttaatagatggtcatcatttgataatatatcaatattttgttcatttttaagaaattatttatcaatttcttcaatttatttgaaaaatttcccacttttgatgataaatgataattatattactaatttaccaggttattcacaattaattactcatatttatgaaattttcgattttcaaatcaaaaatcaattaattaaatattcaaatttgaaaaataataaaaatattaatataaataatttatcgaatgataattatcttttcgttatacctccaaatgtttcacaacaatcaaatattgataaattgtttaatcttttatcagatgtattacaaaatccaagacatgaaagtgaaattttattatgttcaggtttaattaaaagttatgaaaaaattttaaaattatttatattgaaaactaatatattagattctttaatgatagagacattatttgatatatttgttcaatttttaaatcatatctatattgaatcaacaaaggctaatttatttacttcacttgattggtcattttggttagatgtattaattaaattattggattcaaataatagtaatgctgaaattaaatcattaacaactatctatcaaatttgggattatatacctgatcaacatattgaatcatcatttcattggatttcaaaaccaaatgaatcttcaagattaaattttgcattatatcttatcaataatgaaaattggtttaaatttttcggtcattatatgcctcttgaaagagatatgtatattaaattaattgtttggaaaattttaggtattaattcattagaaaatattattcatcataataattataaatttaaacattcaatagatcaatcaattattggtaaaataattttacaaaatttaaattcaacacatagtaaaactgatggattaatatttaaaccatttgatccaattattaataaaaaatttattatttcaccaattttagataaagatgagattaaaagagataataaactgagaatttatccatatgaaatattagatgatgcaatttattcagtttcttcaattaattcagagaaaattagctctaaaacttctttgaagaaaaccaaaagtaatgaaaatacaaaatcaaataacacatggattgggaaaatttttaataagaataatagcaatagcaatagtaataataatagcaataataatcttaaaaatttgaaaaataaatcagatcaatcaattgatgagaataaaagtattagtaaattcttaaatatttctaaaccaacacctattaaagattcatcattttcaataaatgattcaccaatttcatcaatttcatcatcattatcatcattagaattaatgaaaaatgattcatttaataattcaatttcacctgatgatttatctcaaccacctgaatggaatcaacaaattgaaattaataaatcattttatgaatttaaattaattaataataaacagaaaatcaattcattcttacaaagattaaatacttttaataataataattatttatttaaagaattattaattataaatgatgaaccaaaattaccaagtattgatgtcaataaattagtggaatataaatttaataaaatttcaccatcattagagagtcttgttactaaagaagaaaaggatgaaattttaaatggaaatgttactcctactggcatctctaatgattataattattttatcgatactaacaatggatttgattatataaataatctgaacataacgacgggatttgatgatgaaattgattttggatataacacagggactaaaattttagatgatggtttaaatgaagatattaaagaatgtaccaagaaaacacctgcatcattaaattatttatcaaatggtttattaacatataatgaagaagttaatagtttccaaaattttataactgaacaaataactgaattgaataatagtcctgaatctgatttattatcaattgatgattatactgatcattgttcagtttcatcttcttcattattggaaataccgcctattaataaatcatttaaattaaacaataataaatacaatagattaaaattatcaatacctaacattataccacatattaaaggagacaggctcaatgccagttgatatttaatattattaaagaacgctgcatatcataaggaacttatacataaacactatatagcattttaaacatatagcattaaaagtaaattagaattatactataaaccacacgtaaaaaaacactattagcgtagtactataatctttaacattccccttatcataacatcagtttcttttcataaactatgcaaatatcattgaatataccactacgtatattccaatcatggacatattttatactggtaatatcaagtatgatttttattttattaccaagttcaatttatttatttattcaatataaatcaacattaataccaactccacctccattacttaatttacaatttcaatatattgaatcaactgggccatttgcattttataatttaacaaattctgcatatgatcaaattaaaggttggaaaaaatcaaatactaatatatttactaaaattgaacaagttttaacaattaatgttaaatatttaaaattaaataaagattcaacaattggtggtgttagaatttcaatttatgataataaaaatccgccagttatgatacaagataattctaagaaaagtactgggaagaaatggccatttaaggaattatcattaattaatgatgattcttataatatttatagaattgataaaagatttagttcatggaatgaagttgtggggaaatcatattctcgtggtattccattcataagtagtcataatgatgaattaaatattaatggaaaagttaatgttttacaatattttttaccacaatggatgttaaatatatttgttccaattggagtacaggaattattttcatggaagaatgttaattggttattaggtcaacgagatagatttgaattagatagtgatgataattttaagaatttgaaaactgttgatttattagattcttttggtgattttaaaaatttgaaaagtaatagtttttcaactggtttattattatttgaaggtcaattactggaggaagatttccaaaatacgagtttattagttgaattagatcttgatgatatttatatattaaatgcacatgttaaattcgattatgttttaagtggtttaagatggtggctttattggtggccaggattatgttttattattggagttgggattatttggtcatttagttgtttaagttgtttatttatttcatatttaggtttacatatatggaatatacttttttggttggtctttgggtcaaagaaatgatataaatggaaatctatctatctatttatttatctatctatctatctatctataaatgaagtggtactttcattgtatatgttgttgtgaatggtaaacaaataacaagtaagatataatgtaaaatataaatcaatgcaagataatccatttgaatatgaggtttattatcaattggggtataaaatgctgtaatatataataatgaagttgcaggtggtaaacaaaaattaatatttgatataaaataaagaatttcttcattataaaataaaccatctttaaaaatttttgaattaaaagaacaaccaattattggcattataaataatcttgcaaaaacaactccaattggtactttccaaacattaaatgggattttgaaaatatttaatctaccaattgtaccacctaataataataaaccaaatggaacttctgcagcacctaaataacctgcaaaatccattataaaagataatggaggatcaccatcaggagctgaaggtaaatgagcttgaggtgttataataaataatgcttgaacccagggaatcattgcaacagtaattgataaaatcattgtaattgaaacaattttaagtgttgatgcctaaccataaatttaatacttgatttaaataatttcaaataattagttgttttaataattctaatcaatttatggaaaaaattacctgcatttttagttgattttgataaattttcttcaattggttccaataaggcatattttgaataaacacgtacaatatcttctattgtctctggttgttgaccaatttgatcattatctaataattttctaggtactgataaagttcttgataataatggttcattaattctagctgaatttgaagttttaactcttaacatgggttgagatcttgttgttaatgaatatgatgatgaatttggtagtgtttgtgaagataatggatcattatctgctgttatagttagtaaaggaggttgttgatgtaaactgtttgataattgagttgaaagtgatgaatttgaagattctgatattgatgatgttgatgttgatggtgctattgttgattcatcattatttttctctacatcaatattatcattagaattcgactgtatcataattttttcagtatggaaatccatttcaattaatttaaaagcaccaaaattaaattgaactaacatttgtaaagttaaaaaaatcataacataactaacacctttatcaatatcattaaaaatcgttgaagattccattgtttgtaaataagcaattggtaaatctgaaatatttggtaataaaccacaacaaattaatccaccccaccaagtttttggacattttgcaataactccgaaagtaaagcaaagtattgaaccaacacccatcatgaaaaatgaaataataacaattgttgaaatttgatgaatatcattatttgatatattacttacaattttttgaaatgctaaacatggtataagtacattaattgcaattgaactaatatttttttcagtttcagctgttaaaatattttttttacttaaaattataccaacaccaataattaaataaattttaaaaattggtttaactgcgatataaataacttcacctaatggtacgcccattgattgtataaggatatagttatgatgtatataattaattgagatgacactatatgtaaattcagtattaattgttatttttattgctctaaatataataacagttttataaagaaataaagaaataaaagtaaaaaaaatactataaaatctgtcaggtgggtttgtatatagccgtttcatctagacagttttatcccacgataatatcaatttcattaatcaatgttggcaaatgtatcgtccttgaggtcggcatgatatgggaaacggtatggtaaattatcaggatgacattcagggtaatgttttttaatagtttcaagtaatgcatcaaacattaatttataacctttaccagagaaatgaattccatcacataaaagatcactacaagatctttcatttggtttttcattaatccaatccatcatcaaatcatataatcctaaaacaggtacatcagttataatttccttaagagtatcttgatataatttatttctttcattagttctataatcaccagtaattaaatcatcaggatgagatttatcccaatctttagcaacatgaacaccgggagctataacaatcaatgggatatttcttgaagtaaattctttaacagcttccttcatttgaggaataaatctttccaatggcattgattcattatttaatggagaattaccgattaaacgagcatcatttgtaccaaagaacatataagcaattttaatttttttagaatctggtaaattatcatgttcagttttcaaaattgattttgccaatggaacagcatctcttgaattataacctgaaaatccacgttgaataatttgtaatttacgttgataaatattttgtaaagcaggaccaagagtaaattgaacaggagcatcaatatcagtggataaacagtattgatcaaaggcatattcagtaattgaatccccaaacatgaggaaagtgttataatcagtgtaacccattgtctatatagaaagaaggtatatattctactctactatactatactatactatactatactaactctttaatgattaatattgatattgttgagataataaataaattaaataagaaaaacagacattacgtaatcaaataatgattaattctgctgaaaggtaaccaattcaggtacttgttagaagaggttgtgggtgttttagcagtgtagtgggttttagttgaagagtatactatatagatgtgtttgtaaagagatttatgatatgacagtatagtttataaatggaaacagtgatcaatagacaaagatataagagaaagtgataatctccaacagttctgctcaaaatactccctattacagtagagttgtaacaacattattataatggaaataataataaaatatccacttactaacaaaatgacataatttactatgtaatactcatataaagcgcatttcatatggagattttcaaatgctcagcgtttttctatttttttttgattttgattgtataggggttggttggttggttggttgtaatgatgtattttcttattcttattcttattgctttttagctaactattacccaattgaactggtatgagtgtagaacctgctcgtcgtggtgtgtcaatgcaatttgttgattcaaattcttcaaatttaagttcttcaagctcaaaggagataccttggattgcaactgatcaattatggcatggtgaagtaattcattcatttttacccctagatgataataataatttaactgataataataataataaattatcacaaaaaattattaaaaatttgaaaaatatttatgttggtgaacaagtttatatttttgaaactttgaaaactgaaattgataatgttcctttcatatgggcaagaggttatactattatgcaacctttaccagctgattatatatctgcttcaatagatgttaaaaaattacctgatccaaatatttcaatttcaatcttccctttaaattgtgttaaaataatttcaaaatcaactattaatcaaagtcaaagtcaaaataataacaatagtaacaatacttttattgattataatagttcaacattttatgatgagttggatgattattcaatcatgaatgattcagaattaatgacatcttcaaattcaaattcaaattcaaattcaatcaataaaattaaaaaaccttttaagcctcaattacctttaactgattccactttcaatgaaaatttagaagaagaaattaaactcacattaaagacaatttcttcaactttatttgcagtttatgcaaaaaataattttgaattctttgaaaaattatcaaaaatttattatgaattagatgatattcgtacaagtttacattatgatattttaactaaatatgaaaaaacaattgctaaaaagaaagttatctttttaatgagtaaattctcaaaattattatcttctggtggtggtatgattaataaagctcatcattcaaaatcagatattgatggtaaagcttcaattatggctcgtaatgaaaaaactgctgaattatttaatttcccttcaaataatgaatctaaattaattgatcccgctgaaattgctcaaagtcaaattatttcagctttatctccaaattatttatcttcattaaatacttcatttattccatcaaaaaattcacaatttgctgaaacaattccttcaaatattatggtagattttaaagaagttttaggttcttcaaatgttttaccaaaaggttatgctggtatgaaagcttatatgtatttacgtaatactaaaaaaagattaactgaagctttctgtattaatattgaagcaaatcaagaaattcaattagataatttagctgctgcattatttactaatatacctgcaattgaagttgaatcttcaagaatttatttagttgcattattaactgaaactattcatatttctgataatgaaaattcaaaattacctgttattcgtaaaggtatttgtgcaggtgtggcagatatttcacgtattttctcaaataggaaaggtcatttagtttctggtcaatctcatagatttgttattaaattattttcatcatttttagatagtcaaaagcaagaagttaaattatttgcaggtatgaatcaaatgatggcaaaatctttaactatggttaataatggttggggtgaattagttgatagaattattagtggttcaagtaagggtgtggcagttaatccaagaactgaaagattaattttaagtattaaagaattaaaattaactaatgataataaaaaaatcttaaatcatatctcaggtaataatggtgattttaataatgttgcttgggcatgtattccaactttaaattttaatccattagaaattgatgaaaatagaatttatttgaagttaaacaaaattattaataaaaatttaaaattaaatgaaaaaagttttttaacagttcatgttagatcatcaaataattcattaaaatttgcaaagggtagaaatgaaaaattattagattcatggattttcttatctgtttctccaaatgaatcaattcaagaattaatagttattaggggtttaagtgatcgacctgatagtggcaaagattatcttatttttgatttatttttagatgaaacttttatttgtacaacaaaatatttattaagatcatcaaatgaagtttatgattgtggtattaattctaaaacaccaattaatgttgaattaaaaacaaatgattcaattattgttgcaaatatggaaatagatcttgaagttgttggtaaggcttataatagagattctatcggttcaaatattttgaactggtctaatatttatggttctaatttaactgtaaatgaagactcatttattgatatgttaactaaattgaaaagaattcaattaagtacattagttagattttttccaaatttttgttatgaaataatttgtgcatatgatgcatcatcaaaattaggtttgaataaattgaaaaaatcattatttgatgcattagttcatttatttgatgcaacaattattagaaatcaagaatatgtggttttatttgataatatgattaaagattgtaatcaatattacccaaaggttggtgaattattattggaatcaatgacattagttttcagttcatttaataaagaatggaatgcaaatggtagagctttatgtagaacttcatacttagttctgaaaatttgttcattatgtattaaggataataataattttaaaaatcaaactgttttatttacaaaggcaattacaaatttccttggtgccaatattgaaaatgttttagctgatcaattattaattattcaaactttagaactttacttagatattatgaaacctttctttaatagtgctgaattaatcaaattctcaaatgattggattcatagtaacaaattgaaaggtttaggttcattagaagattcaaattctactgcattagttaataaaaagaaaaatagagagcataagtttatcattggtaaattatttttcattaatagattattaaatagtactgtcttcactgatggtaataataatgatattgaaacattattattcactgcattagaaatgatattgaatattttttcaagtgatgtcattgatttagattgttcaagattggcattgggtatatatttatctgttattaacctaacttttggtgctaaaaaagtttacattgatgaaagtaagaaattatacattttattgatcaaactattaccatttttatcaacaactttcaataaatattattcatattgttcaaataatggttattttaaaaagaagagaacatttacacaagtattccctaatgaatatccatttacggaacaaactatggattcaattgtaactgatgttacattagttgaaattattgttgatttttcaattattattgtttcaacttcaaagattttcgaaatttatgaaaatgatttctatcaaaatgttaataatagtaatacaggtatttatgaaaatttaattaataaatttgatattcaaccatttaatagaaatacttgtattacatcaattttacaaactgttaaatatttagttgatggtaaattttatcctcatgattcatggttatcattacattcaatcaatttacaaggatgttatttaattttaagattagttgaaccatttattccaagagcggataataatactattccaatgtggaatttatatttaacattactttgtaaaacagcaagtgcaaaacctgtttcaattgaacatttagaatttactccaaagaaaggatgtcttcaattaacaacagatttaagaagtaaattatccaatattattaataattcatgggattcattaagtaaggaagcaagtgatgaggatcaagctagatttcaattaaagaattttggtggatatcaaaattcagttatgagtatgaataatcataaattattaaaatggattatgttattttcaatgcaaagaaatgaatcatgtttaaatattggtgttaaaattttttggacattaattgctaatgaattagttgaaaaagattcattatttgaatttgagagagaaacggtttcatcattatatgaattatttgaaaatgaattaacttattcaccacagagtaatgaaatttctacttatttagcatcaattcaaaatattattaaaaagatggatgttgaagatatttcatatagtgaagttaacagattagttaaaacactatcaaaatacttaagttcattagttgaattaagacaagttccaaacggtgaagaatttgatgatgatcgtacattccataaattgaatatttcaagttatttaatgaatgttgatagaccagaattatttcaaggttttatttgtgatatgtatgaaaattatttagataagaaaaattatgttcaagcagcattaagtttagaattattggcaaatagttgggaatgggatattaatacttatttacctgaatgttcaaaacctaaattaccaagtcaaacagcattcaaaagaaaagttgatttatttaagattatcgcaaataatttcataaaaggtaataaactagaacaagcagttgatatttataatgaaatgttagaagcatattctaaatataattttgaattaatgggattatcattttgtcatttagaattaggtaaattatatggagaattagagaatgttgatagattagagagtacatttttcaagattttatttattgggcttggattccctgaatctattagaggtaaagaatttatttatgaaggtttaccatatgaacatattacaagtgttcataatagattaaatagattatatccaggttcaagaattattagtaatgaagatgaagcaaataaattgaaaagtgaagaaaatagtccaattggtaaataccttttcattaagacagttattccaaagaaggaaagttttggtagtgagaaattatcacatatggcaaaacaatatgttgataataagaatttaaatacatttattaatacaagaagattacctggtgctaatagtattactaatttatggacagaagaaattacttatacaacttatatgacattcccaacattaatgaatagaagtgagattaaaaataccaatattatcaagattccaccaattaaaaatgcaattagatcattaattattaagaatgaagagttaagtaatttagaatatttaattaaacaaaatttgaaagataatattaaattagaatcaattgcatcaagttcaatgtttaatagtgttagtagaattttagcaggtacagttgattcaccagttaatggtggagctggacaatttaagattttctttaattataaagaagagggtaataatattgatttaggtgaaagtattgaagaatatgagaatgattgtttgaaattaaattcatgtttccaagatttaattaagattatgaataatttacttaaattacatggattaattataccagatacgttaagattacaacatgaatcattagttgaattgtttaataagaatttccaaagtgatattgaagaacttgaattagatgttttcagtgaattagattatgatgaattaatgaaatcattaactaataaaaacgtttattcaaatagacatcgtggtagtggtaataataatagtatttccaatatttcttctagtattatcaatgttggtaaacaatctagacctatgtcaattcatagtcatcatggatcaattaattcacaacatggttcagcacatggttcacgtcatggtagtagatatggaccaatgtcattaagaacggggactggacaatcaagtcatcatcgtcaatcacttagagatgatgaatacgacgaagcactgagcagacaaatctcttcactgagtaaatccaaaagaaacattcttaattataaataagtaattaaaatagaaatagaaatagacaatgtatatgattacgtaataaaacaataataataataataaaaaatcaaattaatcagacctcactttaatcttatgatttctcttcctgttgagcagcctccttctttatccaaatggataactataaaagacaccaaacatttgctaacaacaacaacgttctctcagaggacactatccgcttacaaatgctgggtatgcgtattcgtcaatcagttagtaatggataccaactcccacaatctgcaacagataataataataataatgatatgaataattcatttaaagctccaatgagagtcccattaccaaatcatatggatgcaccacctccacttgattataatggatctacatgttcatcacttgcaggttgggagaatgaaattgagacaaataatttacataggggattaaagagaaattttgaagaaaataataataatactgaaaatgatatgaaggaaagacaagtttcagattttgtacaacgttatggtccacttgtctttgatgaagagttttaattatctacttataaaccatacttatataacccttatttaaagcaattaataataatacgataccactataaagcacttaactaatagcatagagcgaatttcgttttattattgatctgtaacgtatagtagtagcaaccaggaagaggaaggaagccttctcttcgattgcttgaattatcactattgtatactctggttacatcctttccatcatctgcaatacttcatagataatgtcctccggtgtctgcgcccggttgagatcaagattggcttatgtggtgaaagatcccctaattaatttatcttcatttgactggtcgccctattggacaaccccttcatcaatggatgatattcattcagtgtttcaaccacctgatataagatatttaagagatcatcatcctcaaactttggcttcattaatatcatcaatttcaactcatctcgtttatttatcaaaactttcaaatgtaccaattcataaattcccaaaaattcatttacttaattgtatacgtttattgacattgtttatgcctttcctatatgaaaaatcatcatctgccttattagaggataagattttttggtcagctaaatatcattctaaacatcatacaagtgggaatcttcatgaacgaatttctccaacagaatctaatattccaactcctggtgttgatgatgaaagtcataatggtcaaagtcccaatgatgaaacttcatcattaaaagtagattatcatactatgatttattctgactctccattgggtatggaactcatcaactcatgtttagatcttttatttactctagactttacagttcaatcaaataaagtatctgcatcatttgctaatgattatcaaccaatagtatgggaaccaggatgtgaaaatttatctcattatatggatccagtacttgatctagattcaaatagattggaaataatacgtttactattatcattattttctaaaaatttgtatacaactcatagtgatttagtcggtactggttcaagatttttaacagttttcgttgctgtaacaaacggaaggaaatattacacattatgtctatcgcttattaatacaattttacgttcaactcaaaataactctaatcctacaatttctccatatgttaattcaaatataaataataataatggattagaagttcaaaataatgatgttcataaaaaaattagaattttactcgtaactagtattatacaactattctcaatcattgtcgtttatcctatacctttcaaagatattaactttctttacaaatataatatcattctcagtcataataatcaaccgaaaaatagaactagaatgtttttaaataaactgaacaagattgatgatttaaaatttattattactacattatcaattccaatactaaacccaataaatgacttgaataatctgagtgcattttcatacataatgaaatcttcaaaattaattgatgatgatgaaatccatatatggtcaaaggaattactgataattttattggaattttttcaatgtaactcaaaatacagatcggttttcacagaattattaggacccgaattttttgtgtctttgatgtattttgttttgaaatataaagatgatgatagtcaaaagaattttgttaaattatgtgttcaaaatttattatacttatcatcagatttaagaatgtgttcaaagttattgtctcactttaatatacaattgtatgaatctttaccacaactattaagaacttcaacaactccaacttcatatagagattttcttttgattcatctttgtaacatactaagttcttttaataatttgaatgagttttcaaataacaaatcaactgattctttctcaagtaataacaataataataataataataataataataataataataacaatagtatatcaaatgagtctactttaatatcaccactgattcaatttttatacaatctcctaacgatgcatattgccttatttgaatataataaacgagaaaatagagatattttaagtaataggagattatcaattaaagatttatctaaatgtcctccaagtcaattatcatatgcagcttcaagctcgttaattcatgtaataacaaaattctctaatcaaagttatctatctcagaacactaaagtcaattgtgagcatatttcattaatattagccggttgttgtcaagctgtttgtagggatccatcggactcagttgttttattatacatattatctaaaaatgcaagtttattaaataagttggctatgacaatcaagaatttatctgatgacttatttaatacattgattcaaaatgagaagaaacaatttgaaatacgtcaacatcaattaaagcaacaacaattcttacagccggaatcaagatccatgtctcaaaacgatgatcctctgaatgattgttatgataacgataatgataatgaagtagctaatatgccaacactaagtagacaaactacattagagagtattccatctatacgaagtatgccagctttaactaaacaaacgtcacaaatttcaatttctcatgagtctccgaaattagcaccaatcaatcactttaaatttgatgaaggagttgaccctcaaaaaactgaaagtgaagaaaatattgatatcaagggtgaatacaagattttaatctctgatgatggattcaatacacctttgcctattggtatgagtgataggaaagctggtaaaaatccatattatggtaaattcgaggatacttggagtggtaaagaggcattacatgttttaagagaatgtattaaactgacaaatactgagttactcgatcatgaaaagtcaaataataaaaatgggtatatcagtaacaatagtaaattatcagattctttatatgttattcaaacattactgaaattaaatattggttccataattaatgatattccaaaatcagatttatacaatccagatagattagctttcaatttactgaaattcaaatggaattttagctcgctggcttggtatatttcattaatctggtcggatatcttcctcaattataatgtttatgaatctaaagggttattagccgaattaagttccggaatttcagcaataaaaaaaactagttcatcatggggatttggtggttggaaaatcggtagtaataacgatgaaaataataattctccggagccaaaatttaataaaaatgaagaaagtgattattacgaaagtaatgttatgaattatagtatttggtttggaactcatataatattatttagaatcaatccaacatcggtacgaaaccattattcactacaacatggaaaatctgagatactgaatctaataacaaataataataatagtaatagttcaccatttgcagaagttttggtgaaaagaaattctgtgggatcaccacttttgaatatgcgtggtaatggtagtggtgtattcactgaaggtttttggaaaagacaaggtgttagaccaaattctcttgaacgtcgtgatagtgatgtttcattgaaaatgttattacgaggtaatggaggttccaaccgtccaagtattagtcaataatgtaactatttaatagttttgtatatttgaaaattttgtaattatttagatttagtgaaaacgtttttgatttacactctagttattctctgaaatacgacaattttactttttaggtggtattcaaatttataaattgaaaatataacatgtttaaacaaaaaggatagtgacttagttgttttgaaagcataataaaagatgattaaattgttttattcatcatgcttataggtgaagaaatgatgaactggatgatatttactcaagaggaataatattcaataaatatttatgacattaaaaatgttgtacacatttttaacagatttagggaggctcgttaaaataataagtgtttatcattgatggttactttacagtttattatatgattatacgatattaaaaaatacagaagtgtttatatgtgaagtgttttgatgtaatatatatattaagagagagagaaaagaatgcatcaacgtcttccttttttattagtgacaacagtgaaaccatcatcatctaccaatggaggaacataagttttttctgaggtatccatcatatcaacatcttgatccattgcattatcattatcttgaccatcatcttcttcatctgatgaaatatcaggatttaatggatcatcaataacattaacttcaattttaccctttttattattttgcttttcaagccattttgcatatgcttgctttattaaatcaaattgattttcttgacattgtttataacaattaattatatttgttgcaatattaattgttgaaccatcttcaattattgaatcaaattcatcttccattatacctgataataattcatgaatataaataatatcaatttctttattattaataaattcatcaataactgcacctgccatccaatcacgcttctcagatgattgaggtccaccccatgaattatcaacagcctgttgataatgtatgccaattatgtaaaatcattgaaactccaagttcaaaatttgcatcttgtctatcacttggaaatggtaaaagagggaattcagaggatatagttcctggatcattaagaaatatttcagacatggtattattgactaaactattgtacttacagaagattaaaatacgttaaaaaacatgaaaagttgataaaataaaattttcatcaagaaaaaaaattttaaagtccgaaaatagcataactaaataatacatcccggagttaagaaaatttctaaattgctaacaatagaatgctcatatagtctcttattagctaagtatatcacctggtgacatcggaagattagcatttagatgtattgtgaactatatctggtttctttttctgttttcttttatctaggctactaatattaaagaggagaatggcagaaccatcagcaaaggaaaagcttacagctcatgagaatacaataaagatcgaaaatgctctacgtaaaatgaatcaaagtggaatgcatgctaaacgtgatccaacaatttatatcgatgataatggtaaagaattttctacaattgatagaattgttacaacagttgatgcaccaacaagtattatacctgaagattctgttttatttgcaaataagggtggattacctgattataaatttttacgtgaacattttaagagagaaggtaaattaaaggaatcacaagttttaaaaattattaaaatggcaacaaaaatttttgaaaatgaaccaaatatgttacatattccatcaccagttactatttgtggtgatattcactggtcaattatatgatttatgtaaattatttgaaatttgtggagatcctgataagacatcatttttattcttaggtgattatgttgatagaggttcatattcactagaagttttaatatattgttatatagtatgaaagttaatcatccaaaaacttttacaatgttaagaggtaatcatgaaagtaaacaaatgacacaacattttacatttaagggagaatgtttaatcaaatattcaattgaagtttatcatcaatcattaaaatcattttgtgcattaccaatttgtgcaattatgaataaacaatttttttgtgttcatggtggtatatcaaaagatatcaaatatttaagtgaaattaatgatattaatagatttcaagttgatttcccatctcatggaccatattgtgatttagtttggtcagatccttcagatacttttgatgatgaaatttatggttcaacaaaagttaaaaaattcaaagaaaattatgaaagaggttgttcttacatgtattcatataatgcagtttgtcaatttttagagagaaataatttattatgtgttatacgtgcacatcaagctcaagataaaggttatagaatgtataaaaatactacccaacaaaaatttccagctgttataacgttatttagtgcaccaaattattgtggtacttatggtaataaagcagcagttttaaaatatgatgttacaacaatgaatattagacaatttagttcacaacctgaaccttatcatttaccaaattttatgaatgttttcaattggtctgcaccattcgttgctgaaagagttgttgaaattttatttagtgttttaaatgtttgtaccgatgaagaattagataatgatactccattatcaaaggaattaacaaaatctttaatgaaaattcaaaatgaacaaattaataaaaagaatgcagtggaaaagaaagagattgaaattgaaaaaattgaagttgttgaaaataaagaaaatggaattgaaactgataaagataaaatggaagaagataaaccaattgatgaggaagaacagaaaacattggatcaaatggcactacgtaataagatattggcaattggtagattatcacgtatgttacaaatgttaagacaagaatctgctaaagttgaacaattacgtgcatatagtggaggtttaacattacctaaaggagttttacttgatggtaatgatgaattagataaacaattatcacattttgaaagggttagacgtgcagatatgacaaatgaaggtttaccaccaactgttgaagagaaagataaagaagatcatgcaagatataagaaattatgggctagagtaagtaaagggctgtgaaatacaacagtattatgcgataataagaaattttatgaaatttcaatgtatattcttcatcataataatttttggtttcttttatgtatatttataaacttatattgatgttattattattatattgtaattaaaatagcaatgagagaaattgatattagtattaagatatccaatgcaataaagaaaattgagaaatcatttgagaatgaaactgataagggtaaagttatccgaaataatcgaaattcttatatgtatacaactaaggatggtaaacaatgtagtacaattgatcgagttgttcctgaagttgaaaaaccggaaactaagatacccagatatagtgaaattttcaataaagatggtatacctgattataaatttttaatgaatcatttccgtaaacagggtagaatttcagaaaaacatgttttaaatatattagataaagcagaagaattaatgagtgaagaagataatttaatacttattgaagcaaatgaagagataccaattgcaattgttggagatattcatggacaatattatgatttattagaaattattaaagtctgtggagagattaaaaaagattgtaaatatttatttttaggagattatgttgatagaggagattggtcattagaggtattattattagtttatgcaatgaaactttcatttcccaatgaagttaccttattaaggggtaatcatgaaagtagacgtatgagtgaatattttacatttaagagagaatgtgagagaaggtatagtaaacaagtttggataagtgcagtttcatcatttagatcattaccgttaggtgcaattgttaatggggattttctctgtgttcatgcaggtatttcaagtaaattggataaactttccgatatagttgagatagatagatttaaagttgatgtaccgagtaaggggttaatgtgtgatttagtatggtcagatcctattgataattatgatgatgaagaagatagtgaagaagatgatgaagaactatttacatttaatagtgcacgtcgatgtagtgaattatacagtttcaaggcagttgaaaagtttcttaaaagaaatgatttacttgcaattgtaagaggacatcaaccacaaatggatggatatagattacatcgtacaggagatagtggattcccaacagttattacgattttcagtgcagctaattattgtggtacatatggtaatttaggagcagcaattatttatgatggaggacaattagatgttaaacaaatcaaatcacaagatggaccatattgtttaagagatcaaatggatgttttcagttggtcattaccatttgtagctgaaaaagttagtgaattagttgcatcagttttaaatgtatgtattgaggatgaagttattgcataataaaagttatggatgggagatagcggcagaacaatggagaaaaatcagatcagaaagagaggcggaaataaaggaagtgaataataataataataatgatgatgatgatgatgatgaatcaccaagagaagaatttgagagtgtaagagcagcagatattgataacgaaggtcttccaagtgaaatagtttagtataaggtaccttaaagctaaaaatagaaaagaaaataggcactaattaataagaaaacgcgctaatttgaaaaaaaaaaccgtttttttggcactaaattttttttactggttttagccccgtttcactttatctttatcttcatttccatttccatcaaggtgatatataaggaagaagtatctttatcttcatttatttctttccacccttttcactctgcaatgtcgaatcctttcacttttgatgattcagataatgaatcctctactaatgatttccgtttacaagtaccttcatcctctgcacgtctctcagtttcaccaaatagacatttacgacgcgctagtaatattgacataaatgatcatgatccaagggatgatgatgatacgaataataccattaatcattataaccatactcccaataattcacatttaactgttgatccattttcaactgcttttgataatagtgatgataatatagtggaaaatcctaatgattatgaacatgaacatgaacatgaaccacaacattataatgaacataatcacacaatggaatatagtagtaatgatttccttgatgataatgaatcagtttatacaaaatctaatccgattgttaatgtatatgaaaattataatgattcaaattattcatctaatttcttaacaactcctaataaaccattatattctcatcaatcatcaaatcaatataattataatgataataatacttctccaactccttcaaattatgaattatcaaattattatgaaaataacaacaacaataataataataatattaataatcctgttatgaataacacaaataactttggttattatgatgaaggtgattgttatcaaagatttgaacgtgattttgatgaacctgaattaaatcaaaatgaattatttcaagatgatgattttcaaaatgaaaataataatatcttaaacgataatgctaattttgctgataaaggtgataataaagtagaattaattgacggtaaatattatagttttgattatcctgttcctgatcaattattaaataaaatacctttcaatggtgcaaaacaattaacagaatttactcatttacgttatcatgcaattacttcagatccaaaagattataatgaacaaaatccaataattagagattatattgaaaattatcctttacgtccaaatatttatccaattaagagagaaactgaattaatgattgtttgtacaatgtataatgaagatgaaattttattgggtagaactttaaaaggtgttttcaaaaatattaaaaatatgtataatttaaatgaaaataataatcatccatttggtaaacaaagttggcaaaaaattgttgttgttattgttagtgatggtaaaagtaaaattaatgaaagatcaaaagctttacttacattattaggtgttttccaggaaggtataatgcaagattatgttaatgatgataaagttaacgcacatttatttgaatatacaactacttttggtattggtaaatttgattataatagatcagataatagttataaagttccattagttacagaacaaacagttccaattcaattaatgtttttattaaaggaggaaaataaacaaaaaattaattctcatagatgggcattaaattttctttcaccaaatttaaatccaaaagttattgttttattagatgtcggtacagaacctggacctgattcaatttataaattatggaaagcttttaaaaatcctaaagttggtggtgcttgtggtgaaattagagcaatgttaggtaatcatgcaagtgttaatgatgaaagttcaatttggaagaagtttttcagattaatatattttaaaatatcagattttggtaaatgtattataaatccattaattgcagcacaaaattttgaatataaaatgtcaaatattttagataaaccaatggaatcagcatttggatttgtaacagttttaccaggtgcatttagtgcatatagatatgaagcattaaagggtcaaccattaaatgcttatttccatggagaagatatgaaattaaatgttaataaacctgcaggtattttagagagtaatatgtatttagctgaggatagaattttatgttttgaattagttacaaaatcagaaaaatcatatttattaaaatatattcataattcatttgcaattactgatgtaccatcacaaattaatgaatttattaatcaacgtagaagatggttaaatggttcattttttgctgcattatattcaattttacatttttatagattattaatttcaaaacattcaattggtagaaaaattttccttattattgaaataatttatcaaacaattaatatattactttcatggttttcaatttcaatttattttttagttttcagaattttaacattaaatgttaaagatgtaccatttattggtgaaagaattgctaatatattatcaattgttttcctttggatttatattggatcaattgtacttacatttattatttcatttggtaataaacctaatgatgcaaaatatttatatttacttgcattttcattatttgcaacaattgttatttatatgacattctgtgttgttgcacttacaattgaatcaataaaattaattaaagctgatattggagaatatactacatttacaatttcagttggattaaaatatttaaggaatgcaaaatttagggatttaacagtttcaatttgttcaacatatgttttatatttaatttcatcaattatatttttcgatgttttccacatatttgcatgtattattcaatatttattattatcacctgcatatattaatgttttaggtatatttgcattttgtaatataaatgatatttcatggggtactaaaggttcattatcagttgatcataaagttccaccaaagaaggctgaagctaagaaagatcaagatgatgcagttaaaagtgaagatgatgaaactgttaatgaaaaagttttattattaagtgaaaaacttgaaaatccagagaattattttgttcaagcacaaacattattaagtaagggagaagttgcaaaggagaagagtgaacttgatataattaaggagaatatagctaaatcagagaggaattatgcaatgggtagaacatatacagttattatttggttaatttgtaattttattttattagttgttattttacgtacaggtggattagaggattattccaattatgttaatggagagactacaacattaagaaaaagaaattattggaatgatatgaatgttgccaattattttatgacaacaattttatggttagttgcagcattagcattgttcagattaattggatgtatctattatagaattgacttctggatatcagagagaaggtttcataagagaagtgttgtttaattatagtaagatagtaataataagaccgcggtttggtttcggagtttagatagcggtattttttattattagtatcattattattatcttggcaatcaatgatctgtttataatcttattattttatttttataattttataatttataatttgtgtactatatagaggtatttggaatagaattgaagggataaagaagtaaagaaaaggcacagaactgaagtaaaaaagaacaaagaatgaagaataatggaataatggaataaaggaatagaataaggaaaaaagaacaaagaataaagaatagagaataaagaataaagaagggaataaggccagtcattaaaatcatatatcattaacatcattaaaattcatcattattgtgtagtaatatcatagctttttatatgagatagtcttcagttaataataagttattattatttattggactatggaaagcattagtaaataacattgtagatgaatcacttgtaattgaacttggcgataatgttggtgataaataaagtggtgaattaagtgattcattataatttgaaattggtgaataatttggtgtaattatactattattatgttgataattaaaattttgattcatattatgattatgatttatattattcatattattcatattattttgtaaatgaattgaattaaatcccattgatgaaatatcattatctttgtcattttcagagtgggattttttaatatttctactatcattgggtataaatttgtttaaatttaaatttaaacttgaatttggatttgaatttaaaggtgatgtagattcaggtgatgataacattattggtataccttcacttggtaaaactggtggtaataataaagtatttgaattatttgaaaaatttaaatctttattcaaatataaatcatcatttaataagaatttaattgcattattaattgaaaatggtggttgatctgtaattgaaggatcattaacatcatcattatcattattttgttcatcattattattattatcattagagtctataatatttgaggtattttcattccaattcaggctatcaataaaattatttaagatttctttatcatcagatttaactaatttacataaattaattaatgatttattaagtaaagttaaacgtttatctaataaatcaacataatcacttgaatataatctatctttaaattttttcttttgagtataaacacaaattttattatcaattgaacaacgttgacaaggtgatttaccattacatttagtctttttcaaacgacatgaatcacaggccttgccgactctcttctttttacaatctggtggaagcatttacttttataatgatattttattattgattattattaattattattaataatactacaataatactacaatattattaaaaacagataaaagggatattagttcatattatatatagccctatgaaaggtatttaataaagcaatgaagaatataaaagacaatacaatgcaatacaatataagacgatattaagaataggtttaagttaattctatatccgaaccgacggagttaaaatacagaaagagttaattaaatactattaatacttgattaaagtaagtacagcagaaaaagactcttcccagtgaccaacacaacccaatggatgatattaccgagtagtaatagagcgggatatattataagtgtatatacctgtaacataacaatgaggtatttaactggtaataaagagtggctatagtactattatattaattgtattatattaaatattaaatatcctacactgtatgaagttttgtatctgaacgtccacctttgtaaggtgctgcccaattgtatttgaacggtgtctctaacggtggtagatcactgagataatcgtcacttgaatctggaaattcaagtaaatttacccccattttattgtatatttcaagtatttcaactaatggactattttgttgattctcatattccattatcaattccttcatggtaatggaatgatcttttaaattctttatagcattatcaatatattgatgaaactttaatgtgagtttatccttatcttccttaagtaattgttcataccctcttttgtatctttcttcataatttattatagttctttcttcatttttatcttcatttttgtcttcatttttgtcttcaattctattatctacatcattttgtgaccattctccccacggaagattatcaataaaacataaaattcttttatctttatcattaactaatggtctactaaacattttaccatctttaaattcaattgcaaatctaacaagtggtgtctcatttaaattatctaatcgtgatgtcattaaataatcattaatttcattcttatccttgtctccacaatatccaaatatcggtaaatcaattactttaatattaccttctcctttaggaataaatccatatgtactaataaaattatgtaaatcctctaattcatcataactaataaatatttgatctcctttcttaaatttaaaatctttattaccaattaataaaatttcaccagttttaatatcaacatcaaatttggcattataattacaatcatgattaacataatctaatataggtacaagtgtaatatcaacataaaacccactttcttcttcttcatcactttcttcttcttcttcttcttcatcaactcttggaatctctaaaacacgtgaacgtactgctgcaactatttgaactacattaactttcaacattcatattctcattaatacattcactaactctttcccatctttctctctctaataaactaatctctaattttaaattacctgaaaattcttccctaaaatcattaattgcatcctcattttcaatattaaatccattaactttacaattcattaaaacatcaaaataagtataaaaatcctctaatttttcattcttaaatcctttcttttgtaaaacattcattgcaattaattgaacaattaatatttcactctctccataattaataaatttcattgataatcttaaacattctttgaaaactgtcttttcttcatcacttaatttctcaataatttccttaaatgtaactaaacttaacggtacatttcaatggtattctcattaattcaattccattcatcatcatcatcaccttctttaacatcaatatcttcactacaatatacacccattccatattctttattatttttcactgatattttatcattaacaataatccccatattttctctccatttctctaatttttcaaatccttctacacttttatcaaacattgtctattactgtcttatatgagatatatactattactatatactactatgatactaagatatttgaagttatactttcaaatcgttgtgtgttgatcctaacataaacctttaaaagttcaacataaacttctttttcttcattacgtaacatcttcatcttatcactatttaaaacccaaataacacttttaccattagattgatatttaatacttctatctgaatatgtctttattaaatctccaaataatgtaagtggtaattcactactctgtattgtaaattctaaattattaaacttaatttcaaatccaattataccactttcaatgaaaaataatttaggttgattgatatttttctcataaactatttcattatcttcatattcaaccctttctaaatatttacttaatttactccagaaattaccttcagttttagtacttatacctctcattacttgtagtataagatgtgttgattctcctttataatcaattgaattattaccaatgatttcttcttccttttgttctttaatcttataatttcttgctgcattgaggaattgaacttgtcttggtgtaccacttaataactcattcttagaaaatgtatatggactattatgagtaattttattattattattattattattattattattattattattaccaattgtaatacctttacttataatttgataatttttcaaaaatgaattttcacaccattctaatgcagaattcaaattattaaacattacaatcatttcttgatctttctcagtttcccataatccacaatatttaaacatttcaacaaatccttcactattatttgatgttattataaaataacaatttttctccttaagtaaattcctaattcttttaaatccttcaattgcactaaaatcaaatgtaattatattatttaaatcaatgattaaatacttaattggttgttttttataattagcaatttcaaacatttcacgtattttactttctaatcctccaattgatccaaagaataatgtacctgttaattttaaaataaatatttgtttaccaacatttttcaaaaattcattttgtcttgaatttctaataactattgatctagcatattcacctgtaactgttttagttataacaggtttactacctgcttcaataataaatgagataaatgtaattaatataccaattaaaataccatatacaaaatcccaaatacccattgtaattacaattattaaaattgtaatatattcaaatcttctaattctaccaaaagtatcaaaaattgattcctttaataattcataacctaataaataaattaatgaaccaacaacacaaattggtataaatttaataattttattaccaatcaacataacaaaaaatgttgcaattgctaacattacaccacttattcttgaatctgcaccacttttaataaataaaactgaattactataaactaaataattttgaattgaaccaaccataccactaattaaattactaaaaccatgagcaattaattctctatcaacatcaaatgtatccattccaatacttaatgctaatgcaggtacattaattggtacatgtaaaataccgaaaaatgttaatgctaaaatagttggaatttgttcaatcattaacatccaatcacatttttggaaatcataatattcataaaatgaataccatgaatcatttgatgtttcagtcattgtaaatatccaaccattatcccttgctatatctaatgtccaaccgggtataatccaaattaataaatgaaatataatgaaaatcattataaaataaattggtacaataaggggatttgaatttaatttttggaattattataagtaaaattgacagtaaaagtggtattgtccattgaagtaagatttgataatcatcaaataaatatttgaaagtttgataattatattcaataccaccttgaattcttgatgaaacttcaatacctgttataattaagaaataaccaacacctccaatacaaccaattaaaatatgtcttgggaaaaatccaactaatttacctaatttacatttacctaaaataatgaatacaatacctgttataattgaagaaattgcaaatgtgaagatagttgttgttattataataccttcatttcctgtaccatatttactttcgactgataataaaatacttagagccattttatggaaaaatggtgtaatttcaatcatttcactaccaatacctgatttaaaagctgatccacctaatgaataaactaattgtgcaataactgttgaaacataaaacattgataaaccaattgatcccatatgagagaataatttttcaccaatggggaacataatcataccataagataatgcatcaagtacattaagtaaagtacctaaaaatactgcaggtaaatattctattggttttaaaaaacattgtttccaaatttgatcttttgaagaatttcttaaaaaatcaatactatcaaatataggatttgattctcttctctttttgaaactattttcaaaagtataatttgatgaaaattcatcaaatgatgaatcatttattagttgactattttcgtcagaataactattattattcgtattattcataacattttgttgataaggttcattattttgtataggttgatatgattgataaggttgataaggttgttcctctggtacatcaatatttgctaaatctgctgaatcttcatgaacagaatctgatgaatgaattcgtaacagacttgaatcaataggtgataaagtgttcggtttatatgaattatatacaaaacttctagccaatgcattaccagccgatactgatgattgccttgtacctatagaccaaggtgatgatctaccgttctccaccattgtctctctgtagaaagaataaaagaagaaacagaagcagaaacaaaagaacaaaatgatgtcaggaataagatgataataggaaattgaaaaacttcgctcgtaaaaatagattttcttatcagtagccagtagaaaatggcattgatattggtagaagaggtgtttatttctcagattggtatgagtggtatgattgttatgagtggtaaagtgatggagagtaatgtgggggtgtttaggtttggtaagtgatgttaatagttgtgtgaaaataaatagaaaataagttttattcaaaatcatgaaaattacctagatcataatgccgtttagaaatacagatacgaagtaagtgatagataaatagatgataattaagtatatgaaagtacacaatatagtgttctaatataataataatcattacacacataaacaattacaattcatcctttgcaatttcttcttccataacatcatcgactttaacattttcaatttcaattgcaccacaatcagcaataacaattggtttaacaggtttatcaccataacttgtctttgaattttcaatttctttaacaatttcaaaaccttcaacaactgaaccgaaaacaacatgtttaccatctaaccatgaagttttaacagttgtaatgaaaaattgtgaaccattagtatttttacctgcatttgccattgataaaagacctggtctatcatgttttaatttaaaattttcatcaggaaattttgcaccataaattgatttaccacctgtaccattatgtcttgtaaaatcaccaccttgaatcataaaatttttaataactctatggaaagatgaattaatataaccaaattctggatctttagaaattgataactgataaaaattttcaactgtctttggaacaatattaccaaataatccaataacaactctacctaatggttcaccacctctggtaatatcaaaataaactttatgggtaatttcaggtaattcaccagctgcggtgttacttgcattggttggattcatgtaaaagaaaactgaggcaagaattgcaaataagaaagctacaagtctcatcatataaagtgttgttaattaagtacataaattcaaaagaagatacacacacacacatgtgttaacatgtcaattcttcaattcttcaatttgtctagaaagtgttgactattttatagtgaggattttcctattatttattctttacgtaatggtttgttttaattttatatagtaagtctatcaatggtgtaagtggtaaccttggatctgccgttactactgcctctcttgttgatatctgtatcaaacttcatcatcatatcgaatccactcataccaactgttaaatcaccaatttctttctcttctctcttcttcttatttgattttttattagaattattattagaatgagaattaacaatttcaacattctttaatgcttgatcaatcaatgttaataattcatgatcttttaataatgaatcaatctttaattgtgattgtttggttaacttatttaatttattactatcattggaataatgtaaacttaatatcataccattagaatcaataaatgaatttaaaatttcatatccaaaatttaatttaattatattattaataattttatctaaatcaaatttagaattttcacttttaatgattttaattgtttcattagtaatcttttctgttgaaaattcttcaattaaccttttgattatatctttgaaaatttcatcattttcaacatcattcaattcgataattaaatctttacttggtatattaacacatgtaacaattgcttgtctttgtaatcttgggaataattttaatttactgattaatccatgggcaatatcaattggaaataatggatgtgttagaaaatatgttataccacgttctggtatatattctttatcttcatttaaatattcaaataatattaatgtgaaaaatttaactaatttaaaatcaacaaatttatccttttcactttcgaaaacttcaaatttattatttttttcaatcttttcaatacttaaatttttcaaatatccaagtataacattctctaatcctttaacatcattattttcctttaattgattaattttgtcaattgtatcatttaagttttcagtttcattcttaattgattgatcttcttcatcatcatcatttaaatatccttggaaagttataaaactattttcattttcaatttcaatttcttcttcatttggtggtaatggagttaatgcatctcttaatttacctaatccaacatcaattgaaatataatgaatttgtgaaatattttccttggaattttttaaaactaataatgcaaatgtattctttgatttaattgtattaccattaactattggaacatttaataaagttgcatttcttggagttttagtaaatccattgttattttcctttgatcttgaatataaatctaatgatgataataatgattcatatttaatatcaattagggaaactgtactacctttagttattaaaattctattagttgatgcacatttaattgatgttggagattccttcggttccttttgaaaaactcctgttatattaataatttttttattattaatcaatggtaattcatatgattctaataataattgataattatcagtatttttaagaataactaacttacctgatatatcaaatgtaaactgaatattattaagttttgaataatcatcaacaataatttcagaattggaaatttctaatatttcatctaaattaagtgaaattaaacgtacattaagtttattactatttttaactttttcaactattaataaaatattatcaactttttgagattttgaattaattgataattgttcaggtttaataaattgatgatataaaatttgattatttgaattgatattatcattaaatgataaagtttcaatatttgatttattaatttcttcgtcagttgaaaaatttaaaactgatattttaccatttttaaataatgcaaataaataatttgaatttgaatttgaaaattttaaaccaataatttcatcatttaattgaattgttttatcattaacatgttttaaattatcattagattctataatatgtctatcttcttcattaacaactgaagttgagctactttgattttcatcatcaatatttgtcttattattattgttattattagctttattattattattaccataatcaataaatttaatgaaataatttttacgttcattaatattaactgcgaataattttctttcattatcagtatttaaatctaagtcataagaatccattgcagttataattgaatctggtgataaagcataagaccaaatcatttttggtgatggtcttgttataaaagttgcaatatatgaaccgctaattgtaatatcaaaattacttgaatttgaatcatttatttgtgatgtaaagcaaagtttagaaatatccgatttactttgtaatcttggtaaattagtgacaacaaatgggtcataaatgagtgaagacatgtttgaattgttagaatgaaatgatatcaaaagaggttattaatgattaatgtagttaaaactagagatgaaaaaaaaatatttttcattaaaagtgaaaataaagtgaaataatttttttaaattttctcaccataataaaaaataatgcactgatgttgaaatttgctctaggagcttggtatagtgggtgtaaagaatgcattctttgaagctttgatcttatatattactttgatcatacaattgttatggtattagaaatagctgatataaatatggtactgacttatatgtaattttcaattttgggaacttttcattactatggtaatttcaacagtaaatatctcttttaatatcaacgatataccactgtaagtgagcctattcgattctctgatatcatttatacctgcatgtagcttttaatttttactgatgtttatttggaatctaaattatcaatattactattaaggtggctcattttatgaaatttgaatatttcaatgagttatcaacaattaggaacttggctagatcatagatttctctacatgttactattcaatgatatctttattctgatagtgctaaaaagtcaatacaaatagcttcaaaggtatataaatcacctaaagcataagaaatacagctgaagaaagaaagtaagaaaacgatgagccataattttcccacacaacgcgtaaattgactttacaaggataataataataatcaaaattatttatactaatatacactttaaataataaaatagaaataacataacattacaaaatataggtaatcttcaaatcttcaaagcttaagctgaagcggaagaagtatatttagtaacagctctagtaccttcagagactgcatgctttgataattcacctggtaagattaatctaacagcagtttgaatttctcttgcagaaatagttgatttcttgttataagcagctaattttgaagcttcagatgcaattctttcgaaaatatcattaacaaatgagttcataattgacattgccttttgggaaataccagtatctgggtgagtttgttttaaaactttatagatatatgaagaataagtttcctttctagtcttagttcttttctttgcatcagttgatgctgcggttttcttacctgctggtttcttttctgctggagctttagatgcaactgtttttggagccatttttgttgtttaataagtataaaggaattaacaaaatgttattaattaaggaatgaaactagaataagtgggaaatcaatcatttaaatagtaaataatagtaaatagttgtagtatagtaatggtaatagtaacaaacgcggttacatgttatataataatagcgtactgaaatttacgaaaattaaaattaaattataaattgataattcgcactttattagtagtgttcctatttttacactttaaagtgataattttcataccgcgatatttcatatcctatttacttctattatacttctcctattactattatcattataataatcattataatttataataatcattactattatgttaattgataattgataattgatctgggtatataaatataaggtcaattcctctttattgttttgattttatgtatattttctattactttcattttacttccttcttattaaacaaaacacttattcataaattataaaaatgtccggtggtaaaggtggtaaagcaggttcctctgaaaaaacttcaacttcaagatcttccaaggctggtttaactttcccagttggtagagttcacagattattaagaaagggtaattatgcacaaagagttggttctggtgcaccagtttatcttactgctgtccttgaatatttagctgcagaaattttagaattagcaggtaatgcagcaagagataataaaaaatcaagaattattccaagacatttacaattagcaattagaaatgatgaagaattaaataaattattaggtcatgttactatcgctcaaggtggtgtcttaccaaatattcatcaatctttattaccaaagaagactgcaaaggcaaaggcttcccaagaattataagtaaattatatttaagtaaattaaactattgttatttaatttaatgtgtatattagttaattgatattattattattattgtaaatattgtaattgttaacatttcctaaatgggaaagtataccgatgacattgctgagccttctaaatataaacatctttttgataaaaattgcccctttttccaactactttcctaactactttccttgtagattataaataacaaacagttttcccactttttacatcttttgcccttgtctactactacttcttcttctttctttctttctcttatttccttttgctttctacttcttatacaagggtctaatcgtcttttaatttaaacgttaatctctttacttttcttatactaaataaaatgccaatcagaagaattcttactatcgttagagaacaatacgcatctcttcaaaagagatttggctctaattctgaaaagaaagaaagttcagctgctcctgttgcaactgaaaatgttgaacaagttaatgcagaatcaaatgttgatgatgttgtagctgatgaagctccaattgctgattcaaaagttgcaagtgcttaatttgcatattattggttattctaatatctaataatcaataatattgttctttgttcttttatctcatatcttatatctaatatccttttatcttttatctcttttatctctagttaaatgtacttattttgcttttctttaactttttattattttctcttaatttggttggtttggtttcattgttatgttgaattggagtcattgttgtatcttatgttgtgttctttaatatctaatttgttaattttaatttcttaattctctttcttttaatttctttctttatctttttataatagtacatacaaaataatattatttcctacactaaaaatacattgtaatataaattttatattaaccacaataatcccaaacattcaattcaccatttaatgatattgatacaagtatttcaccataattataattatcaacttgcattattggactatttttaatttcacttgcattcaatttaaacattatatcttgtgattgaatatcccaaaaaattatttcaccgatttcattacctgaacaaatcaatgattcattattgaaaacaataaaacatgaacctaaacaatatttttctgcaattggtacattattatcatttttaaaagttttaacaactaaattgttaatataatcccataatcttaaataaccatctaatgaacttgataaaatatactttgaatttggtgaaaatataacattactaattgggaacgatgaaccaccttgtttatcataaattaaagttttcaaacatgatcctgtctctgtattaaataatctaattaatccatcatatgaaccacttacaataattgtatcatcaaatgataaatctaaacttgaaattggatctgaatgagcacttaaaattctcatatttttaccccttttcaaatcccaaattctaatattttcatcacttgaaccagttattaaaattcttgatcttttatcaaattttaaacaattaatgaaaaatgtatgatttttcaaaattttaatagttttctcaatttcaatatcccaaattctaattgttaaatcatctgatgttgatgctaaatatttattatttggagaaaatgcaatattggaaatacctttaaaatgtccaattaatttacattttaaaattcctgtttttaaataccataatttaattgaattatctgttgaacatgttgcaattagttcaccatttggacttattttaactgttgatgtaaggttattatcatgcgtttgtttaatactatatcgtagtttatattttggttctattgtcattatctaaagaagatcgagttgttaatataattgtctgaaatttcgatatatcttccaattggaaatgtcatgaaaaaaaatatgacaaagattacgtaataattcgatacatacccaaaattaaactgttaaagagataaaaatttataaagaaacgataagaagtggaattatacaagatatattataaagatagaaggaataaactatttaaattgttttgaagtttcattcatgacattttcataacttggaggttgatttgattcatttaatggatcaatatcaccatcatttgttgatccatagttattatcattattattattattattatttgaaggagaaaaagatgtttgacatttaaaatcaccaactatatgagataaaggacttaaattattatttaaattattattttgattaatactttgactattattcctactattattattactttctaagaaaggttcaggatgactaaatctaattttagtttgatttggttgtttatgaattgttaaattattcttattatttggattgtaatttggatcatttgtatttataatgaaaatttgtctctcttcatcatcaattaatttatcaggtgaagataaaataatataccaagaatgaattgtaccaggaatccaacctaataaacaaaggcaaacattaattaaaaaatcacaagaacataaaccttttttgattataacaggtaaatggtgggaatattaaagctaaaataactaaacagcaatcaggtacacaacaacaacaacacatggtatagtctttgatgatatatttagaagtctaagtaaagcaaattataacttaataaagtgtaatttaatctctggcttgcgaaatcttaaattatttatacggaaaattaaattaaagtggaaaattaaaccggaagaccggtatctatctatctatctatcgatgtctatatcctaaatacttacgtaagagactgggagattgttttgaatgactggctgttattatatacttatcagcgtgaaacttatagcaatcttagggcattatattcaagttcagggctaccgatgagggattatatatcaatttacattgtagaaagcccaccttcggcagtttaactacaatagggttgttttctttaactaatgaagaggaagaacaagataatcttattattatccctgaatgttaagtttatttatttagagaatcatgttaggaattaaaggttaaaggggtaatacgaggctactatataggggcaaactttcttattgaattcttctaattgtgaacgagttagttccctgtaattatggtttgattaagatttgtaacacttaccatttgtattaaattgtagtattattaactaggattttcctgttgttgggacgttattgccgagaatttgtgtcctgtattctcacaaagctagtgggaaacactgggaattgaaagaaactaattaaatatgaccgcagtaaattagcaccatctagtaatttccagatagaagtggagtccgtgtaaataagcgaaaactaagtgcggctggatcgtattatagtcactgggacggtgggccataagagacaatacgaggcagaaaaagtgaaattttcgaatctattaatataagttaaaactatattattagaatactgggcacgtaattaaaacttagggtaaacgttacattccgacgggaatggctgtgtttacgttgtttatattgttggttgactaggaaataactcttttgatattgtgaatctttattgtgaaaagggggcactcgttgaaatttcttgttatacctattatttacatttatttacaatcatttacaattacgattgcaattggattgaaattggattgaaactatcgtataaatcagatccccttccacattccctgtttttcaatcctactttctaactgattcttttatttcttctttcttttctttcttcttcttctgtattcactattaatataaacgaaaaccatgtcactatcaataaataactatcatatgaataatacacatactcatcatcatcatattcaaatagagaaacctttctatctttataaaggtttaaaccctgaaagagaggaatcttttaaaatatatccaaatattgataataataataataatactactataaatcattcaaattataaaccacttactttaccatcaatatctttaccgttacaatttgttaatcataataataatgttattaataataatataccaaaattagatattacaagtactgaaatgagaaattcattatcttcatcaaatacttcctcaactttcactacaccactttcaactgataatgaaattgaaaatgaaaatgaattaattgataataatgataattatttatcacaagataattctataaattctgataatgaatcaattaaatgtcattatcaaggatgtcgttataaaggtacatttttatcaaaagattatttaagaagacatataagagaacaacataaacgttcaagagaacatatttgttcaggttataatgaaaatggtataaaatggggttgtaataaaacatttagtcgcccatatcaattagttaatcattggcgtggtcaaagatctttaaaaagatgttccgtacctgtaatgaaacttaaaaaagctggtgtcttataatcattgattccagtcaattgtcattccttacataaataataccttctataataccttctatactatatacccatacaataataaaattattcaaattaacaatccccatcgataattgtaaattaatgattcaacagagtctcttttgttagaaacttgttacaacattgtttcaaaaatggaaaaatttctagaaatttactaagcccactattttccatcggataatacatgatgagatataaggacatgaacttcctaattagtttattaagggtttagatctacctccatattatagtgttcggaaccagcgagctcagagagctgaaaaaaaaaagaaaaaaaagaaagaaaaagaactgagactatccctatttggagagactcagttaccaacggttgcttggccttttcgctctttactttgctatttttaccgtcggaatgtttatttagctcgtttcgcatttataggagtgcgaaatttcacagttatttgttattatgtcatagattgtgacacgtcattgattgtgatacatcatattgtgatagatcacatttaaacttaatttactaatatcatatttcgaatggaaagtatttaaaggaaataatcacagagcaatgatgaagattaaaactttaaactcattagaaaagtttagaaaagaaaagaaaaaaaatcataaaacaaaatgacatcagaatcttgggacttgatggttgataatgataacaatagtgctaatgaatatgaatttgataatattttatcgccggtaactacaaacactaatgcttttataatgccgaaacttaatcatgataacaacaatagtgataataatgttgatactgcttactaatagtaaatacaatctatttgatagatttagttatattcaattaactgattatatttggaataacaaaaaagttttaattaatgataaacataaaagaggtgatttatttaattggtttattaatttaattgatttaaatattattatatgtaaagaatttatcgatcaaaatgaaaattctttgaaaaaattaaagaataaacgtcaactattgctgtttttaaataaaaatttttcatcaattcataaaattaattcaaattcaaatacaaactcaatttcaagttcagtattaaattcaagattatcattatataaatcatcactgaaaaattctaaaaatggtacaaatagtacaagtttattaatgattattttaagaattatattctatttgtttttctcatggattacaattttttatcttgttttctatacagaaattttagattatctgtttgttaatgataaacaaaaaatgtatgcattgaaaatgttaagacatgttgttcgttcattaattgattgattttatacttttattgcttgctttttgttattctttcttcaattaaatttactcttaaggttactctctctacctttaagtttttatacttcctaattgggtaattaatttttattttttaaaatttcgcgaaatattcatgtgagcacctctccttgaagagacttgtcattgacctgacatcaattttcaacaacagtcgatgatatattaatgcaattttaagctcagcaatctgtatctataatcaaagcaatgggttcattaactacttttattaaagctattagaaatagtaaaacaattgcaaatgaaagagcaatcattcgtaaagagagtgctaaaattagatcatcatttagagatattaatttagataatgataaaagaaggaaaaatattgaaaaattaatttatctctatataattggagaatcaacatattttggacaggttgaatgtttaaaattattagcaagtaatgaatatattgataaaaaagttggttatttagctacaatgttatttataaatgataatgaaattttgactttattaacaaattctttagatattgatttaaaatcttcagatcatttaatcgttggtttagctttatgtacattaggtaatgttgcaaattatgaattagcaaatgatttatatccaaatattgaaaatttaatcaattcaaataaattatatattaaaaagaaagcagttgttgttgcttctgcactagtcgaaaaagattcaaatttgggtgaaatcttcttaccttacttaaatgatctattaaataataaaaatcatagtgttttattgagttcatgtgcattgattgaatcaatttataataataatgaaatcttaagaaatgatttaattaaattaataccaaaaattttatcacatttaaaactattatgtaattctggttatagttcagaatttaaaggtatacctgatccatttttatttgtttcattattaagaactattagaatctttaatgagtaatgaaggaattagtgatggaaatattgataaaaatattgaaaacttaaatgatttattaacacaaatttgtgcaaaatttgaaaattgtaaacttaattcaggttatgcaattttatatgaaactgttaaaacaatttttgcaattaaattagattcttcaattaaagttttaggaatcaatatattaagtaaatttttaattcaaaaggataataatgttagatatgttgcattagaaactttattacaagtgaattgattatgaaccattagcagttcaaagacatagaagtttaattgttggatgtttatatgatggtgatatttcaattcgtcgtagatcattagaattaatttttaatataattaatgaacaaaattttaaactattaattaatgaattaattaaaatatttgaaaactgagaatgatgaagagattaaaatttacttaacaaagcaattattaatatcaattaataaatttaataaaaatacaaataattttaattggtcattaaagattttaattccaatcttaaatttatcgggtaattattgtaatgaaaatattttatcaacaataattgcaatgattatgcaaagtaaggaagatcaattaattaaagatatattaaaagaattgattaaaacattaaaggaaggattatatgatcaatttggattaatgattgtaacagtttggtgtttaggtgaatattttgatttaatttctaatgaatctttaattgaagataattcaattgatataattaattcagttttatcagtgtcgaattatttcaatgaaaatgagaaaaatcaacttaaaatttatacattgatgacatgtttaaaattatcagtcaaatttcaaaattctaagaatattgaaaaattaagacaaattattaaatcatttaataatgatattaatttagatattcaaattagatcaattgaatatttgaaaatatttggtgaaaaaatgtcaatcaaaaaaggattattagagagaatgcctgcgcctacttattaaaacttcaagataatttatcattgatggatagaactgtaaaggaaagtagtagtgttagtaatgctagttctagtattagtaataagggcaatattattgaagatctgttaggtgatgattttaaaacaaattcttctggtaaagagacaaagaaagaaattaaggatacaactattgatttattatctgatatatttggaagttcaagtataaaacctaatgaagttaagactaccaatactaatattgttgaaccattatcaattgaaggatttaaggatgaaaatattaaatttggtataattgaaggtgaaattggagaaggtaaatgtgaattacaggcaattgttaaaaatattaatttaaataattatgaaattaataatttatcagtttcatgtgctgtaccaaaatcacaaaaattacaattatcatcaattaataaaactaacttaaagaatggagaatttactttattaaatattcaaattactggtaataaaggtagtaaaattaaaattagagttaaattaagttatgaaatcaataataatggtattaaaattgataaacagtttgattttagtaaaataactaagttattgtagtagttttataataatgtttaaaatagaatagattatgttgaatgattacgtaatataagcataaattgcgaatttttttcttttttatgatgagaaatcctcgaagggcaaattaaaaataaattcacggatgtccatcgagagagcatgtccatttttttgctttaaaaacttcttttgaagatcaacgacaaaatggatttcaagaacattcaagctcaagcacaaaaatatttaaatcaaattgaacacgtaagtattaattaattgagttaattgagttaattgaagtcaattggaattaaaattggaattgaaattttatgagctagtatactaacatataattataaaattttatatagaatactaaaaatgtttcaattttagatacatttgaaggtcaaactaaattacctagatcatatgcagttttaggtttaggatttgtttattttttaatggttttccttaatttaggtggtattggacaattattaagtaatttagcaggatttgttttaccaggatattattcattaaaggcattaaagagtaaagcaaaggatgatgatactaaattattaacatattgggttgtatttgcatcattacaaattattgaattttggtcaaagacaattttatattggattcctgcatatttcctctttaagacaattttcttagtttatattgcattaccaagtactaatggtgcagaattagtttataattcagttattttaccaattgctaataaatatattacagttgaaccaacatctgatttaatggataaagttcaagaaaaggttgaataattgatttatagtatattattattattattaatatagtgattgtttagttattgtttagttatcattcagttctttaaattgattttatacttatacttatacttatacttatattaatagtagtaatctatttgcttatcaagatataataatcgataatttaagataaagataacatcgatgaatatgagacgatgcgtcgacagtgggaatataacaccgtacaatttaatcggggaatttatactctttaaagataaacaaatcaatcaatcaacgctgttttaaaaaataagagcggaattcaaccgttgagaatttgaaaaaagaaaatgtccttttctccgacccggcaattcttaattcctcaattctttatttctttatttcctgatatagcaaaaattttatgcggtataaggggggggggggttactcagtttgagtcattctaagtgggaatggggggatgattattataatgaagtatattatgttatgttgttatcttctttatacttttaatacaagttctacgtagaaaacaggaacataagacggagaaatgtagtccatccgtagataaacgttgaagtggtttaaagaggggaggttgtatagtagtaatagcggagaatattaatagataaagagttatagtaagtgattcccttagtccagtggctattactaataaataatagaaaaaatataaaaagttaaagtccgtttccccatgagtcgcacattatactttgatgtgtcaaagaatttcaatttttataatttctatttaacgttttcttattgttcacttggggttatacgtgaccttgttgttttcaatctctattttcatctctattttcaacgttgctgaaaaggtttaagttttttagtttttttttataaaaaggtcccttatcctttcttttgttttgaattatcttcacctccccgcaatttacttaaatttttttaatctatttaagtttcctttttctttttactttttctttctaagagttctttattaaacagataacaaaccattaatcaatcatgagtcaaaatcatttagatactcaatctgttaacggttcatttcaaacttttaaaagtgatgacgaaaatcctcatcatttagataataatgttgaagaaatgattgaaaaacctgttattaattgggaaaattttaaacattatatgattacaagatttacagatttattccccacaaaacaatcaatgcaagcaaagagacatttacttaatcctttaccaggtcttagaatgattggttttagacaatggttaatgattttatctgctttcttagcttggtcttgggatgcttatgattttttctcaatttctcttaatgcttctcaattagcaaaagattttgataaaactgttaaagatattacttggggtattactgttgttcttatgttaagatctgttggtggtttctttttcggttatttaggtgataaatatggtagaaaatggcctttaattgcaaatttattatgtgtctgtgttttagaaattggtaccggttttattaaaaattatcaacaatttttaggtgttagagctgtttttggtatcatgttaggtggtgtctatggtaatgcagctgcaactgctttagatgattgtccagctgaagcaaaaggtttcatttcaggtttcttacaacaaggttatgctttcggttatcttttagctgttgtctttaaaagagcaattgctgataatgcaaaacaaaagtggagagcaatgttttggtttggtgcaggtgtttgtttccttattacatgttttagagcttcattacctgaaactaaattattcttaaagcaaaaagaaattgaaagatataatattgaacatggtatttatcaaaaaacttttaaagaaaaggcaaaggcatcattaaaagtttattggttaatgattatttatatggttttacttatggcaggttttaattttatgtcacatggttcacaagatttatatccaactttattaactgttagatataatttttcagataatgcaacaactgttacaaattgtgttgctaatttaggtgcaattacatggtggtattttaattggacatttctctaattttacaggtagaagattagcaattattggatgttgtatctgtggtggtgcattaatttatccatgggcatttattgataatgcaaatattaatgcaggtgcattttggttacaatttttcgttcaaggttcttggggtgttgttccagtttatttatcagaaatggcaccaccagattttagagcattcgttgttggtattgcatatcaattaggtaatttagcatcatctgcatcatcaacaattgaaacaacaattggtgaagatttcccaatgacatcaccaaatggtcaaccaatttatgattatgcaaaagttatggcaatttttgttggatgtgtctttgcatatgttttattagttacattatttggacctgaaccaaaaccaaaaattgaaaataataataatgaaaatgaaaataatgaaattgacgaagatggtcataaagttgaagattatgaattaaatgaaaaagttaatcatgaagaaatttatcaagttgaatcaatttcaaatcaaggtaattcaaaggcaatttaaatataacgtattatagtataactggtttataacaaaaaactaaataacattctttacatcttttctatagatttttcaaattaaattaataattaaataattaaataataattaaataataattaaataattaaataattaaataattaagaacgatgtgtttaattacgtaattactaaagataagtataacgttagtatctcaatccttatactacaggggttacactaagagtgaaagtatattagagaggtttatagcatccaatattagaattagtaaaatggatattatttttggaaagtttacgtaataagatatttgatgtattattaacaaataacaaaacaagaaaaataggatttagagaaatgttataagataataatagaacaaggtacaggatgttacaagatgcatgatgatgatgatgatgacatttaccccaggttttgtataattattatcttagtatcgatactattactttaatttaagtttatctaattaatatcatccgggtagaataggagtagggtataagggtatgtcctccgactctacggacaagtcccgtgagttacccggatttcactattattatgggattataccatactaattaatatccgatttattccgaatatcgtagaaatgcggataatatactgttctatattgtattataattgtaataacataacaatttctattgtattattactcatactaatggctttaaatttatgtacacactacattaatgatagaaatagggtaagagtaaaatagaaaaatagtagaagagtagtatatggtgaatacatttattaaattacatctgacattgaaaatgttaaataataaaccaccaattaaaccaggatataccaggataccaggatattaacaatttaattttacacccccactctccccacactaataaattaaatctattttaaatttaaatctattttaaatcccgggaagaatataataagtaaacaacactaattaaatatttttacaagtcaaaaaaaattaaattaattaataatctccggggttacttttccatttctatttctatttctattttaccctattttaccctatttcttacaagttctataaatatcaactgtaatcccgttattattatgttatccaaaaacccttttcttttgatttttgtttcttaagacaagtattattatattaatattatattatattgatcaaaatggcaccaactgctgatgatatccaaaacgaatatagacaaagtgtctcaactgaacatgaatctccatttaataaaaatgaaagaaaatcttcaattgcttcaaaattaggtttaaatcctgatgcaaaaattcattataattctgctgtaccaatcttatatgaagatggtttaaatgaaaaaggtacaacaatttcttcatctggtgctttaattgcattctcaggttcaaaaactggtagatctccaaaggataaaagaattgttgatgaagaaacttcaacaaatgaaatttggtggggtccagttaataaaaaagttgatgaaaatacttggaatatttcaaaatcaagagcaattgattatttaagaacaagagaaaaagtttatataattgatgcttttgcaggttgggatccaagatatagaattaaagttagagttgtttgtgcaagagcttatcatgctttattcatgaaaaatatgcttattagaccaacaactgaagaattgaaaaattttggtgaaccagattttacaatttggaatgcaggtcaattccctgcaaatgtttatactaaaggtatgacatctgcaacttctgttgaaataaattttaaatcaatggaaatggttattttaggtactgaatatgcaggtgaaatgaagaaaggtattttcactgttatgttttatttaatgccaattaaacataaagttttaactttacattcatctgctaatcaaggtaaaaaggaaggtgatgttactttattctttggtttatcaggaactggtaaaactactttatctgctgatcctcatagagaattaattggtgatgatgaacattgttggtcagatcatggtgttttcaatattgaaggtggttgttatgcaaaatgtttagatttatcagctgaaagagaacctgaaattttcaatgcaattagatttggttctgttttagaaaatgttgtctatgatccagttacaagaaatgttgattatactggtgctcatgttactgaaaatactagatgtgcttatccaattgaatttataccttcagctaaaattccttgtcttgcagattctcatccaaagaatattgttttattaacttgtgatgcaagaggtgttttacctcctgtttctaaattaactaatgctcaagttatgtatcatttcatttcaggttatacatctaaaatggcaggtacatgaagttggtattactgaacctgaagcaactttctctgcatgttttggtcaaccattcttagtcttacatccaatgaaatatgctcaacaattatctgataaaatgtcagaacatagttcaactgcttggttattaaatactggttggtgtggtgaatcatatgttaaaggtggtaaaagatgtccacttaaatatactagagcaattttagatgcaattcattcaggtgaactggctcaacaagaatttgaaacttatccaacttttggtttacaaattccaaagacatgtccaggtgttccagccgaaatcttaaatccttcaaaattctgggcaagtggtgttgaaaactttaatactgaagttactaacttagctcaattatttatggaaaattttgaaaaatactctgctggctgtaccgcagaagttgttgctgctggtcctgcattataaacgacattagtataaatattatatcccttcttccatccatgtgtgtttttttgttcagttatttattatgttttatttaaatttttttaactttttttttctattttacgattccagtcatatattctttataaagcatcattttatatatcatttaacctaaaagtaacggtataatgaaaagaaaaaaaaataaaattgaaattggaatttagaattaaataaaaatgttatatatgtgattatgatttgtagaatatattatatagacttaacaggtaattgaccattaactaatacaggttttggtaaatgtttttcatttatttgaatattgaaattatccttcgaaacaatttcttcatgaaactttaataattaaatttgataaaggttcagcataccaacgttcactattaaatttgaaaaatccaacatgaccacctaaagttgtattaatcattgaaataaatggattatatttacattgatcaattggtaatgcaccaacttgtaaacctccagtaattggatcatctaatgaacttatattaataaatggagttttaattttagttaatttataaattggtgaagcatttgtataataatcatcagcacaagtaaatccaaacattttcgatgtgaaaacattatcaaaatctcttaatttccaaattttcctaatgatttgattagtatattgtgatttaaagattggattttgaattaattcatttgaatgagattttaaaagcatcattaatgggaatgtcattgcagttgaataaaataatgatgaaatgaatccattttcaaggaaatatgatgaacctcttaaatcccaaattgatgctaatgaaattgctaatgaaacatttgaattttcaccttcctctgctaaataattactcataacaattgaaccaagactaacaccaaataaataaattttcctatttggatatctctctttaaaaaatttaataatttgtctaatatcttcagtccataatgcacaaaataattttggtgttgtaagattaacattaccacaacctctagaatttcacaacatataattcaaattcttcccttctctttgtgaatattttattatataaacatctgaatatatgattcaggctgatgaacctgataatccagttaatgtaattacaatcgcttttgaatcagttgaatattgattatcaatttcttcctttgtcatatatcttaaattattatcagtaatttcaggttgattatcaggttttaaaattttatccttttcataattattaaattcatcaattgaaacaacatgatctaatgcaacacaacctccatcacttgcatatctaatttgacgtgtgaaatatataacatccgttttacgaaatcttctaattccagcatacattgtctgtaaatgtccattaaataagaatggattaaataatgaccatgcattctctttaaactcaggtatgtttttattaataaattctttcattgtaattggaccctttaatgattcattattgaattcaattggattatatggatatgatgttataactctattaattatatcataattattgaaaatttgaaaaatactataaattataactaaactaacacaaaaattttgaaaaaaagaagttgatataccaaatatattaataactgaatataatttatctagtatagatatcattatgttgtatatctatgtagttttgattgatatactactatatcgatgataaaagaagtcttatgtataggataggaaaagtattttgcgattatgcaatgtcatcggactattaaaaaatattttttcaaatttgaacgtgaaaattgtataacaataaatttaatggattattgatgctctttaactatattatagatgagatgtttaagagtattccatgaaattataccaattgtgcagttttcttaataaaactcatgttagtaaaaataatatttcccagacaaaaatatagaattaaaaaaataaatgtttaaactccttatcaggggctcgaaccctggacatttcggtcgacttcttaaagaattcttaaaagccgaacgctctaccgactgagctaacaaggaatttgttgaaagtaaatttttaggctttgacctaagatggtattttggtgttaaaacacgtgacctcgataaacttaaaaattatatcaagaactaaggctgaaactaagcctgtttgaaaagagaatgctttctttataaaatttaagttttattggtaaaaaatataaactataaaggataaaaaattggtataattatcagtatttaagagtctagaagggcatatatatatatatatagaacaaaactatgaagtagctccgcttgtccacctctttgactactaataataatagatataactagatttgataatttgaattgttctttttactctgataaaagttatctgagggtactcaagatatcatataaaatattggtcaatagtagtttgttcacattgtatttttattctaaagcaatcaaaagcaattttatagctcaaataattagagtagcactaaaaaatgtgtttctaatatgttttataaacttaagtataaattaatgcaatttctgttttgaatttttttttaattttttaatcacttttgcattttttcaataaaaatttatttttcaaaaatttgatgtgagacaatatttaacagtatacagtacataaagataaatatttaaagtatcgtgacaaaaaatcaatgagtttcccctggcagatcataaagtatgagcacttttttaaaaaaagtcacgtgaaaaaagtagcaacgagggtgcgcaaaagattttaaaaccaatacttccgatgtagtgtaatggctagcacggttctctctcacagagcaaatccgggttcgattcccggcatcggagcactttatattttttttaacaattttaactctatcttctttaactttaggatcaaagcataatttttactcctttcttttttaactagctaataaataaattaaagtagaaaatctattataaaaaatgtaaactgtttaaacaatgttatctaaaactaatttggaatttctaataaaatcttacctgaagtttttctaccttccatttcaattgttgcagttttataatcttttaatggataaactttataaatatcaatttttaaatcaccatttttaattaaatcaaacaatgatttagtataaaattgaaattcttcaggttcagtaacataaccaaataattgaggtcttgcaattttaacattttttggtgataatctagtaatacttaatggagaaacagcacctgaagcattaccgaatgaaacaattgtacctttacgtttaatagatttcatatccatttcaaaagaatctttaccaatcgaatcaaaaataccatcagcacctttaccattagtaatttctaaaattttatcagcaatttgatcatatgaaagttcagatgaatttaataaaaattctgcaccatttacttttgctttatctaatttttcatttgttgaagcaacagcaataacatgtgcttttttaattttacttaataattgaaccaaaattaaaccaacaccacctgcagcagctgtaacaagaatataatcaccttctttaacattatatgcttcattaataaaagtaattgcagttaaaccttgaagtaaggaagctgcataaagttttaattgatcatcagttgcatttgatcctacattaattattgaaactttatttgaatcaagtttagtaaattgagcaaaattttggttaccaagataagcaattttatcaccaattttaaaatttttaacatcggaaccaattgcaacaatttcacctgatgcttcacgtcctggaatatatgggaatgaagctggataaataccattacggaaataagtttcaatataattgatacctgaatatctatttttaactaaaatttcatttgatgcaagatcagatggaactgggaaatcagttgaaaattgtaaaacttctggacctccggttttatcgtagtagataactgattgtttttcaggaattgtaacagttgtagacattttatttatttgaaaggtaatcaatggtttaatattcaatgatttaggatattgaattttccttctgaataatgtagatatcaaaggacgtttgaaataggaacattgtggcacagtgaagttgatgttggcagaagggagattcagcgagtatttatactaagagagtttaataagagagatctgatgctgagtaagtactccacagtttttattgttgcgcccggaattgtttgaacagcgtgtttgtaagggaaggttattgattattaatcagtgtataggttgatcaattaacagtctttggatacaggatgttgttcattagtgtatggaggttattattagcattctcagtggttagtggtgatgaaagtgtgaaatattatgtacgcaagaacagttatgataatgttactaatccaacaatttacaatgtacattcaagtggggaagaatacacatgtcaaataccttcaaatgttcatttcaccagttctgaaattgaatcactgaaaagttctagtgaaatgaaattagagaaggataatgcaattgaggttataaaggaatttagtcttcaacatagaaataatactgcttttaaagagataggttattggaaatatctcgtcagatttgatcatgatattcaacaatttcatacagatatttatgatggtattataagagttgataactataaattagctgcttggtcagataatgatgataatgattcatttgattcaataccttattataaggatgataattccaaaaatccatatttatcaacatctgattttgaattaataacttctgatgatggaactaaatatgtctcacaaagaattgggaatggtgaaatttgtgatataacgggacgtagaagagttacaactatcaactattattgtagtgaacaagatattaatccacatatacgaaatattcatgaatggagaacatgtgaatatattttcgatattgaaagtatctacttttgttcctttgatatgtggacagaacctaaaacttcaagtaataatgtcatatcatgtgatttgaaagtagaagatgagatagatgaggaaattagaactaatccatctatatcaattggatctgccaagaataaattagaaccattatctcctggtatcttcttactaaagaatactacaaatagtaaatttgatttattattgactagaaattataacctttgggaaaatgaaactcaaaatgaaggatttcaaaaacttttgacagatatttcactaggatttcaaagatacatcaaaaatctgagactcacaattactgaatctgaggtcaaagtagttaagttaactgacccaattaaaataatttttgatgtttatgatattgatagatcactaataggtgatgtagtattagaacaagatgaaaatggatttatagtgtcttattttacagacgaagaatccccaattgataccaactgtttatcctgtatactttaaataatattttttttatcttatttgtaacataattgaatctatcaactactactaaacctataataaataataataataatagtactagtagtagcagtacactcactaatcaaatgagtagaatgtcattaaattctaatcgatcgaatatgaataaattaagagataattcaagttccctctcagctagaagaaatccaacgaaaatgagtttagatagtttatcaaatagaccacaaccaatacctagtagaaataatgatacaaattcaagtattcaaagtattcaaagtaatgcaagtactcaaagtaattttagtactaattcatttcaatcctatgcaaaatatattgatattaaatcaggttcattaaattttgcaggtaaagcatcattacattcaaaaggtattgattttacaaatggttcatcatttagaatttcaatggatgatttagaaattttagaagaattaggtcatggtaattatggtgttgtttcaaaagttttacataaaccaactaatattataatggcaatgaaagaagttagattagaattagatgattcaaaatttagacaaattttaatggaattagaagttttacataattgttcatcagattgtattgttgaattttatggtgcatttttcgttgaaggtgcagtttatatgtgtatggaatttatgaaaggtggttcattagataaaatttatggtaatggaattaatgaaattgcattagcttatataactaaaagagttgtaacaggtttaagagaattaaaggataatcataatataattcatagagatgttaaaccaactaatatgttagttaatgaactacttattacgagacaaaaagttcagaattagaaaaatttacagttataaaaatacataataaatagaaaatgaattaatttactttctccttttatatcttgatggtctattgttattattattaattgccatagatgcaggtagagtaccttgagaaatatgttgcaaaacaggtattcttttatccagtggtagatttaaatctgttacctttatatttttcttctctattaaacctgttagaagtctctttatcttattataaagtttgatttcttctttaccaggttttaaaactttaccaccatttgttaatttggtcttatcagttataactctcttctgtttttcatatcttgtatgacgaatactatttaattcagtaagatattcactaatcttggcttgaacattattatttgaaataatttcagcttcatcatcggaaactaaattgtcttcatcaaaacttactaaattatctaaatcaatcttttcatcatctgaaaactttattaatttaggttcctccacgatatcttgcatttccacatcagtattacctacttcagttacttttgtttcatccttgttttcatccttattctcaactttatcttcaactttgttttcatccttgttttttactgtattttctactttagtttcatctttagtttcagttgttgtagtatctttcttttcatcatcaacaacttccttatcaccttcatttaaatccttcttttctgcaatagtatcggcatcactaataccaaaagctttttgttctctattagacttttgtttcagatcaaccaattttttaaaaccaacttgttgacaccaagttatccccttccaatcatttgaaattattgattgtgtttcatcatatgaaggagcaaaactaaaatttaatgaagttatacccgatccatgtttaagccattgagatgaaattaatcttaaccaatttggatgcatataattttctaaaatttgtttaacatttggatatttgatatcagttggaatgaatttagccaatgtatcagtatttctcatagaaatatttggaataacattattaatagttattccaagagatgcatcaatcactggttcacgatcatctaattcggattggaaattattaattgatgaaaaaaatggaatacttcccgctgagaaaatagataatgatttacctgttttattatagaaaactgatgtgataatatcaaaatctttttctaagactgaatcaaacccttctgtagtttcaattggtttcaattgtgaaatttgcttttgaatttgatcatcattacctacatttgtttcattatttgtagaatcagtttcatcaactttgttagattcattagttgtctcagcgttcgattttttatttttcaaacttacacctaacttcactgcttctctcaagagtatttcaacagaaactttataaaattgatcaatagctgaatataatgttggattatcttcaaactctaaaattttaataatacatgcaagtttaatatcatgaaatatatcataaacagattgatattgtttattttcaaatttagattgtaatgaggttttatctgattcagctattgatggattagcatctaaaaatttaagaaatgaatagtttatatctgcaatatttgtttcaaaaaaggtgtctctgttagggaatgatgttgaaagaactcctgcaatgtctatgtgcgcataaacataaaacagattattcaaaaataattcaaacacttcctcttgtccttctgccattgtatttacctttacgaaaagaatgtatgctgtttcaacaagatattagtttgaaatagatctcctaataaactcagagaaacagcaaaggaaaacaaatttcgtgaacgcagacttaaattttctcactacatgacaaatttgaaatttgattttttggctcttttttaaaggatttactgtaatttatcttaattttaaatgtaatctaatattattctacacaatatgtacagagtctatatactattaaagagtttcccaaatacccccttttttggattgtgtaaccttttctggtaaaagatcaacacctccagatccactggcaatattagcaccgtatcttggaacaacgtaacattctctagtttcatgtcctttatcatcaactttaacaacaggtttacctagtggtttggaatatgtaattaatcccgtggatttaccaacattagaaagtgcaagagatgttatatcatttaatggctgaattctaattttcttagatttaccgctacttttttgtaaatgtgaataaactaaataatctggtgctttacctgttttcattatgatactactaggatgaatgtaaacataagaatctgattcttcatatgtattagatgtcttttcaggtatataatttggtgtgatatatggaatgttcattattttcatattattacttaatttgaattctttgttaatagtatctaatctaaatgcaatttgatcaataaaacccgctgcaatcatttgtttaatagctgaaacttgttgttttgttggtttagccaacttcatttcttcttcagtgacaacattggaaactgcaatggattctttcattgtatgcaatttaacaatataagtcaattgttttcttaatttcaaaatttctttcatttgcttttctcttaaaaagtgttcttcataaaatttagttctcctattcttaggaatatgatcacttgcacaaatagcagataagagctttaaactatcgctatgtttgtctaatttagaaaacatttcatgtgatttattgaacttttgtcttaattttcttttattttcaagatcaaattgtgacacatgttcaacaactttttcatagtcatcatcatctccatcaccaccctcttttttagcagcagtttcattaacttgaattcctaaatcatattctgataaaaatggatcaccaactgacatacctgaaactaatgcaataacataaggcaaacatccctgttgattagcaattaataaaatcttggaaaatctaggactcaatgggaacagactcatctttttaccaatacttgtaatagttgccttttgtttatctaatgctcctaaatatttcaataattcctctgatttctttaacatagctctgtttggaggagttggaaacggaaagttgataactgtttgaatacccatacttttcatatttaaaacaacaccttcaactggcattctcaaaatttcaggtttagaaaattgttcaaattcactttcataaacagcagaggagaataatctataacaatgaccaggaccagttctaccagctctaccagctctttgatctgcacttgcctttgaaatccaatcaatctcaaaagattgaactgttgtttcctcatcatattttctttcctttgccctaccacaatcaacaacatatctaacatttggaatagttaacgatgtttcagcaacatttgtagcaacaacacacaatcttgaaccttttggaggatcttcaaaaattttcatttgttcactagttggaagtaatgagtataacggtaaaacatataatggatcattttcagtttgatcttcttctaaagtttcttcaaaaccttcttcttcctcatcttcatcatcttcattataatcttcattgatttcaatttctttgacatcaaaatcaatttcttctgcttcaatatcagcattattagcatcaactttcacatcgactaaatcattatcatcatatgatttatcaacaatttttttaccatttttaccctttaaaggaaattcatttcttaactttttaaccatagcaacaatctcagctttacctgtcatgaaaactaaaattgcaccctttggtaatcttctatgaattttacacgttttcctaaatgcttcttcggtatattcaaatggtgtacgtttattaaagtgaacagaaacaggatattgtcttgcatcaacttttaaaattggaggtggagtatcaaataaaaccttattttcactgaaatcactaactcttaaagtagcactcataatgattagttttagaggatgaaatttgtcaggttgtttctcatgatattctcttcttagttttaaaactctactaagcataccaattaaaatatcagtattaacatttctttcatgagcctcatcaataattaaagcagagtatttcattaataagaaatcagtcatcatttctcttaacaagacaccatcagtcataaattttaaagcagtttgatcaccaactgtggcatcgaatctaatttgataaccaactttatcagaataattacctaattcattaccaactctttttgccatagaaactgcagcaactcttctaggttgagtaatacctatcataccaggggtatcagatccctttacaccataaccagattcaaaaagaaattgtggaacttgtgtagttttaccagaaccagtttcaccacaaataatgacacaatcattatgatgaattgcttccattattctactttcttcagcaaaaacaggtaagcttgatcttgcctcctgtatttcattatttctaataacatttactgtaacaatttttcttttcaatgattcattaattggaataaaatcttcctttaaaccatcatctaaatcttcttcacggacaatagatttatattccatttgaggtgcaacaggcgcaacaaaagattcacgaccctcagcttgacgtgcttgctcttctgcccaagctttaaaatcttttgctttttcagtgtgttcttttttgatattaacttcaatttcaacatcactttcttcatcattctcatcactggattcctcttcattttcttctgattcatccccttcatcatcttcgtcgtcgttgtcttcttcttcttcttcttcttcttcttcttcttcttcttcttcttcttcattttcttcattctctttatcatcttcgtcattatcgatttcagctacactaccttcatcttcattctcttcttcactctcatcgctttctgaaatgttactatcctcttcaagatcttttccatcggaactatctccatctccaacttcttcatcagaactatcactcaaaaagtccatttcatcttcttgttgcttatcttttttttcatcttgttcaatcttagttctccatgaataattcttcttcttttttttaggtttaaccttttcaatatcaccaaaaccaaaaccagtacccattccagaaaaaggtttagcaggtctatagtcaatgaatcctccactagcagcagaagtacttttaaattcattttcatcatcactgacttcatctttttcggaaggtttattatcttcaagtaaatctgaccaatttttaacttctctttcttcataaagaagtgctttagtttcatcgttaccctttccaagtctttcaagttccattgcttcaattatcttttctttcttggtttttctatcaccagtaccaattaatttagcagatcttaacatacttgtatcaattcttgtttcttctaactttttgaaaagaatttccttttcttcccttttgagttgatgttcgatatacttatcaagtcttttcttcttttttcgagagatcttttccttatgttgctctaaaagctcttccttaattcttctctttctcttcgacttttcattttcaagacttgtcattgtattagtttcattgttaattatgttgttttcagatacattttgttgactagaattattctcttgatcttcattatcagagagagaagctccggctttaccataaaaactttttttggccatttctaaggacctttattgttaaatctagcaaaaattgtatttctctaatccaagagcaataaccacaggtattataccaatccaatcattaagataaaaagagttaaaagcattgtaagtgaaaaaaaaatttgaaaataatttttttgtggtggcacagcctgaaatttgattaagttttccaggagcatgatttcatgatcgattctcatttctacacaaacaacttataaatagtatcaccttaatcaaggaattgccaaaggtctagatagatctaggatattggaattaatctatttgatatatattaatgtctaatgtggataataatacgaaaaatggtagtgttccagatgtttcacccacaaaacttcgaagatcaacaagaaatgtaagcagcagtgtatcaccagttaaggaaacaaagagtgaaatcgagggtaattcagaagaggaatacggttttatcgattataaaaatgtcaaaactattaggttaggtagatatcagtttaatacatggtatggaaactcagctctttttaaagaaccatatcatgataaaataactaataccatgtgtacagaattggaatttaaaacagtggatccggaaccattagagacagtggtagatgactcaattaggatttctcaaaagtatgaagttgactcggagagtaaaaagccttggcttgagactttgtatgtttgtccatattgttttaagtttacagatgttcaattggaatgggaacaacatataaattattgtaaatccaaaaacaaactcccagggaaagtgatgtataatgatggtgaaactgtgatacggaaagtgaagggtgtaaatcataaattgttttgtcaatgtatgtgcctattagcaaagttctttttggataataaatcaatattctatcatttagagtattttgatttctatgtgatttatcaacatctagataggcatgaagtacccatgggattttattcaagggaattattatcatgggattcaaataatttatcatgtatatgtgtcatgccatgttatcaaaaacgacgactaggaacaaaactgattgatttttcatataatttgacaaaatatgagcaacaaataagtggacctgaacatccattatcagaacttggtaaaataacatatctaaattactggtgtagaacaattgctattctttttgtgtatggagaattatcagctaaaaaatatgtcactttacagatgatcagtgaaactacaggtttcagaatagatgacattttcctggcattatcaactttgaaagttttataccacaacggcaaaaagaacccagatatggattattacttggaaaggtataaatacagtgatcattacgtgtttgtgaaagatgaaaactataatgtttatattgacaaaaccaaactaaaaaagtggattatagacaataaggtagagaataaaatgattttagataagaattgttttgtgttctattaaatccaatactcattttccttacataaactactgcttaaataacttttgtaactcttctaatcttttcttctttctttcttcatcactcatcgtcaaagtttcacctaattgatttttactagcttgaatctctaacatcctttcctcaatactatccttcataataaacctaataacttcaacgtttttcaactgtccaaatctatgtaatctatcaattgcttggaattcaatagcattattccaatgcggatccattaggaacgctcttgatgctactgttaagttcaaaccaacaccacctgcctttaaacttaataataaaactgatattttcttttcatcagtttgtggtttatcaaagtcattcaatattttttgtctttgttccagattaagtctaccatcaaatttcaacacatcaaattcaccttcaaacttacccaattcagtttcaataatatccaaaaaactagtaaattgtgaaaaaacaataactttctctccaggcgattcttgtcttatcatttctaaatgaatcaacaaagcatttatcttggaagatttttgatttggagcaaatggtcttacaatataatctctttctttcaaattttgtgaaattgtcttttgtgtcaaataatcactgccagtgtcaatatcaaccacatcttgtacaacattagagttttttttaattgtcctgaaaagtctgtttttattgatttcttctctacacattggacagaaaactttttcaattactaatggagaatttgctgatgtttcatcatcagcttgtttttcgtgttttagttgaaaatcaaaatgttcaatcaaacaacccagacaaaagcaatgcttacattctgtaacaacacaagtattgattttaatatcatcagtacatatagcacattcaacaccatcaaaacttggatattgatcatatatttcatttttaagcttattaatctcttcaagaggaattttttgctctttttcaaacttatcaatagacctaaccaatgataccatttccatatcttctttaactgataatcgcttttggtcaagtggtttattattcaaaatatccaacttatcagtaagtaaagtgttatcagtatcatcattagtgtgtgttataagatcaacatgacaacaaacttgacgaagccttagcaattgagtcaaaattgtagaatagtttttgaaaactagccctgcttcgacattttcattgaatgagttcacagctctttctttcaaccatttgtaaatgatatcttctcttttgttaaatttcagtttttcaatactaacatgttttggtggtaattcgactaaaaactttccatttgaatctttttgatttttggttcttctcaataaaataggatcaaggatggatttcaaaagttcttttgcagattctacatctttaccagtatcaaatggaactgaaatacattgtttccataatgaatgataactccaaggcttcaaacctagaaaatgaaccaacgaaaaaagatcttccaatcgatttataataggagtacctgtaagaacccattttctatctgcttgaagtgagtaaattgctttcgcagttttagtagacttatttctaatattatgaccttcatccaatataattctcaaaaacttgactgaaaataaacctgtacctctatgaagattctccagcttatccatttttgaccactccgattggatcataccatatgtagttaatactactgttggtgggttgggaccacataacattctttttaaatttccaagagagtcagaaccataataaataaataacttgtgatcttttcctttggtaacttttatgaattccttttcccattgtgtaagtaaagccataggaacgacaattaatgtagtagaaaaagcataatccttgatcttttcaatatgattatccggcagtatatcataatagtaatctttaggaaacgataaaaccaatgataaagtagtaattgttttaccaagacccatttcatcagctaaaataccacctttacaatttgatttaattattggcttttctaaagaacatgtacccttgtacagattcatgtaaaattgatcattgcaatttggaggtaaatctacatcttgtagacgatccggtaatactggccaagtatactctttccacaaagggttcaccagattttcatgtaatttcaattgttctattacatcaccctgagatatttcatcagtttcttcatcatttgaaccaattagttcatactctttttcacgttgtaacatccaactcaaacctaatttttgatatggtcttaattcaagattaaaattattaggtgttgtttcaggtaaactatcctgaagattattgatttctgtgtttttatataagtccttgatatgattcaatgataaaagagatccatcttctgagttagactcacctccagtaccatcagttggagttcctgcagcaatttcttcatcaaactccacatttttctctaaattttcaacttcagagctaccagaatcatccccatcttcatcttcgagagtaataggtttgtttaagtcatctgatgatgatttagttgtattttgagcagatttaagacctaatttatcgaatagtttcaacattaagcttttcaaacgtgatcctgcttgtatattaccacctgaatttttcatcatttttatttgatcagcattaaattcatcattatagtcagcagaatttggagcttcaaatatattttcagacaaaaagcagtcagttctaataacaaaggagtcacctgtacttaatctctcatcatccacataaaacaacttactttcaaaaaccaccgctttgtcttctaatagtggtccaatgagttctgccatttcctcagttaatctaccaagttctcttttgaaattactattttcaggtttgtgattgacataaacagcaccggatccaggttgatttacaaaaattaacctgttgtgttcataaatggacttcaaactaaaaaccgatcttgtacaccaacacgaaatgtttatagttccaatgtattttttccatttattatcgtttataggcttttcagctactgatggttttcctattgatttggcgttacttttctttcccgatgtatttcgtgtttttggtttggcttcctttttgaaaaactttgacgtttcattattaccaataatagaatcaattccacgttttcgactttgatattcatactgcattggctttttcttttctttgatcgctggcgtactcttcatgattggtttagtgaaactttgaggaaggtctaagtaagcatttgtggcatcttcgattggtgtattggagccttgaaatttttcatagagaagtttaacagaagtttcactaatgccacccaatattgagatcaaaccagttctaaatagtacaaacttatcatctccaggaaccttttcttcaatattggtactgggtaaaattgtcggtatgctatgatcaaaaaattcgccatcttttctcctttcttcattcatgactgtttgtaaatggtaaaatatatcttatttttcaactcttcagcagtaataagtatagtagatatgtcaaataacgtaccttttagaaagatctgaagaacttaatgaaatattttttgttcatgcagaggatattttgaagacgcgtttaacatggtgtttacaattaggtttaaatttatttgcctctcaaagttcatatagattgaatttgaaacaataatcattccgtaagtaaactataaagatactggaatattaaaaagtatataaactgtaaaatacacatagcatcagccaaaaatacaaaagtaaaatatattgtaaaaataatatctatttttatcaatatgaaaagaagagaagaagtgaaagaaaagcattaaaacacaacagatcattaacattaagaagtgaaaaattgaaaaatattgtgatcaatacattcttttgatactaattgaagaaaaagcccatattataatatataaaaatcaccatttgacaaagtgtcccaaaccagaaactagcggtaaacaacctagttatttttttttattttttttattcaaacttgaacacaagagtaaagagatgaaacagttttatgattccataaacatctgctaaattgttttgaagtttattttttttagaagttaggtattatgaaaaaattgttgagtttagaccaacaaactcgataaaaaagtaattataattttatcaagtgaataatgtatcaagttcagccagagagacattttcaggactttcaatatcttgattcaaaaatccagatctaacagtttccagccatttggcacttattgaaggttcgatagaggtatcagtcataattgaactagttattgaatgaacagcatcactttgtacaccactatatgatccaagcgctacaactcttagagcagcaacagctgcagcagcgttaggtgtatttgcaaatgattgttttcttgggactctaggtgtaagagcagctgctgtcactattctttttggactttcattatgtttgccttgatccatatcagaagacgatgaattacattttgatctcttattaacaaaactaattgattttgatctttttgtgaaaccaaatggaactctttctgttacaatatctgagccacgtctataatatccgtgattttggtatagactgtcatcatcatcgtcatcatcatcttcaaagtcaaccttgagtgaactatatacatcatcatcattatcagaatcaggaactgatgttaaatattcttgatttttactaacaataaagtctccattatatgaatctgaagtagtcattttttcatcaattggtgctgtaatattcagagatgcagtcaccggagcaacagaatatggaactgataattgaggaaatccaaaatcaagtgtaccattagagaaaggtgatactttattcaattgaagtccagcaggtgatattgattgtagagaagataaatcaccattaggtaacttactaaatctgataagtttgaatcagaagattttaattttgatgtataaacaaggttggaatcattcatatctaattgaaaatctgttttctcggattcaacaggattgaaaccatcattattcatatcaccatcagaagttgattgaagattaatttgtgataaactttgattcaatttagcagaagcgtttgctgcagcatctctttctctatgctgttcaataatcttttgaacataagctggatattctggcgataaaataccacgataaacataaaccattctttttggagaggaatctgcccaatctctggataaagcatagtgaattgatgaatcacccttttcaacctttttaacataagcattcagttttgcactaaccaaattagaagtttttgatgataatttagacatatctggatgtttttcaactagtatatcacaaatttgtttaacagtcataccttgactttctggatcatgatcaaaaagaatgataaaaattgctagcaaaacatcatcatccattgaagcatgtgtatcaggttttggtctttctccagttaaaggaacagaagttgagacaccacttgcaaaattgataatacgtggagtctttttctctttcttctctttcttttccttttcctttttttctttcttttcagctttggaaggttttaaagtttcaagagaagctgtacttattgtttgtgaagagatagattttgacattgatgatgattcaacaatatttaatgaagttttagatatgtctggtttaatatcagaaattgaagttgcattagttgaagttgttgaagtaggcgtagaacctctatctgtttctggggaagttggagcagagtccatattatttaaattttcagtattgaaatcagagaattcttcagatgaattaatatgatcttgtgacattattttaaaattattataggagaattatagttttttttttaatcagctaaagctttgaaatatggagagatatccgtctaagttttatataatcaagataaatgaataataaatgatgctataatataaaactcgggctctaagaatttataccaatttcaaaagcttaaaagtataatatttgatagaataaaaagtatattgaacttaaattagaatgaatttgtataatatattggtttgaatcaaataaggtaaatttaaggttacaattgaaatatgtgtcaaacaagtgaaattattattgttgtttaataattgaaatttgaaatcaaagtaacgtttttagttatcttaaatgaaacttaatgaaatatattgaacttaacaaagatatgatagactgtaaaaatatagaagagattagtatttggttcttgtgggggaaaaataacttgatatcatcgtggaatacttactatttgatctattattaaatttgttattactcaaaatgtggttgatttaagttgattataattatcagaaatattagttaaaatcttctgacttaatgaattaaaaataaaaagtgtaaatataaaaggatcttgggaatgatatattaattcaataaatatcaatacaaaagacttattttcaaatatagtcaaaatgagtattctaaaatactttttatggaatttgactcagttaaggttatagtcttaattaaaataaaactaagattacaaattaagaaactccgaagagtaaatatttagaaatacagggacttcaaggactcaatagaaatttcaattataggtaaatataacataatcggaaaattattaaaatctcacacaagataaagtaaaataaagtgaaataaattggtacaagtcaagtgaagaagaataataagataacacttaacaataatcggaatgtaaatgaaattgaaaataagttaaaaaggtaaatagatcaaaattaaatgtagataagcctaattgggaacaaatggcattaatttaacattacttctaccctttttgcccaatttggaaagtgtgcgtctttttcgttatttttgtgtcatctcaaattatttaaataattttgacagtcacactaatttagtaccaacgcaaatagtttaagcctaaatgggataccacacgcgcaccaccttacatgcccaatacggtaattctacagattaaagaatgtgaacgtgaaaaaaatatttttttgacgtttaacgttgaatttgaattttatcgatgttttgatcatttatctagctttttctataaataatatactaatacaatgtgttaatgtttctattttaattatttctatcctattttttcatagaaacagatatatgcacttccatcactttcaggagctttacctacattgctcaatcctatcttatcatcatcaaatttaatccatttgttattctctctcacatctgatgtataatgtccactgtttaatgtcccataatgtctaacaattccacttaatctatattcgaagttaccttcttgacctctagttgggaaaagtttcaactttctttgttcttccagatcctttacctttggaatgtatgtacccatttttaaactcgttggtatatcaattgttttattgttctttacaaattcgtatctattacttgaccgaaaatctctccaaatgaacaattaaaactttgggtaatcttgtgattgttagctgttttttagtacttttacttttttgacatgaaggacatttccatgcattattacctgttaaaatctcaagtgatacaaaattatcaatgcaatcatatatgttcatctgtgttttattgtttggtattggaactgaaagcatattaaagggtatatatgttgttgatgttctgtaacaatttgtacattcaagtcttgatgcatattgtcccgtgaagatttcaacaattgatgaataattagttatgagatatctttcccattcaattgttgatgctaatctaatcggtaaaatttccctgtttttctcatcttcatcagttatttctggtaatggatttttacttgcagccatattcaaatcttcatgaatagaatctaaaaggaagtgtaaaaattctgcagaatcttgttgatcataattatcaaatagtgaattgaacttaccgatggtttttttaaaaatttcaggattagtaggttttttcaactttgtattcagtgccatcgtttcaagcaatttatgatattccttagttaattttcctccagaacttgattttgaagttttagatatttgattttgatatgaattttgcaatacatacgttgataaatcatcggttccaactaaacattgcagtgaagcgtttaagtaacaggaattacctaaattaaccaaacctgaaataatcataggagatgatttatcaagtttttcaattgaagataaggaattataattagtaggcttttcgggaatcttaggctttttcaactctagagaattttttcttctgaatgttggtgaaggtgatctagttctattagatgatcttatagagtaatgataactatctgaatatgaggaatctgatttttgttgtgaagtatagctacctagcgaataattactggtgttatatttattgatagtattgataaaatcataatcattgctggtattatttgttctctcatttgtcatataacttattggtgatctagatctggatattgttggttgcattacttgggtatctatattgttcatattcgctgaattactacttatctttggaattataggggagatagcattcgcagctatactgtttggatcattattcataaaatttttccattgattaaagccaccttccaaaaagattggttttcttttcagtctgaattggggatttctatttttctcatacaaaattgatatcaggttctttagctcatttgatgaattaaattgagaagagttttgatcaactattataatcaaatcataagcagctaatttaagaaaacgatccttttgtgttttattactaatcaaaaatgaatgcagggaaatatcatcaattgtatatgacggtttgactgatacgggatctatatttacaacatttgaaaaaatggaaatatgatctttttcaaacatcatttgtggtctgaaatcgattatcaataccgagctattaaacttatatgaaatattaatcattgtttcaatattaatatgtgataatgaagaataataattcaataatttttcattttcatttggtattggtgaaggtgatatagatcttggtctgtcagaaatttgagctggttgaatagatgatttcatataattactagtggtgttggtgtttgattattttagaatttgatgataaattttcaataagctttgatttttcaacaatcattccaccattaatcaacatgttaagtctaggaatgaatattattgttataattttgtttggagatacaagctttgatttctttgaatcttttactatgaacattaatgacattttcgaaaaatttcaactcatcattatttttatcaatattaatacatttttctaataattttctagcagcagtataatcggaatacatttccttaacagattcaataccaataatatccatagatttattatcaacttcatctgataaaaataagaaatgttcaacacatgttttcaaactactgaaaagtttggaagttggaatagatgatattttattatctactatatcatccaaaccttggaaaatggcttcagcatcacgcagctgccgtattaaagatctctgtgcaattccagagttagtcgtctccatataacgtatgaatttactttgtcgaatagaaaaaaggcttgtaataaactccctcctttaccgatttgccacccatttaaaacgtgcatgatttcagtgtcataaaatttcaattcgcttatcttttatctgatcatgactgatatatagatcactcaaatgattaattgttactttagttcagttgagatagttgtgtttaagtttgatataatattactgtgatgttgatgggaatttatttggtggattgaaggatagtaagtactacattaacaggattcactgagagtataatggattaccaagttatatctacaagtatttctgatgttacgtaatcatgcttataaaaggttatctaatctcttcagttaatattatatagtcttggtagttatgggagaagataggatatgaattacaatacagaagaacttaccactactcatcatcccaattaaactcttcttcatcttcttcattatcttcacttgtactcttacttaagagctcccttctcttttgttcatctttaataatttcagctcttttaccaaaataaaccttccaaaaatcatcttctgatattttatcaacttctacacttgcatctgtagcttcttcatttgatttcactactttcttgaatacttgcatgagatgtaatgaatcatttgatgagagctgtgaaatttctttagtttcatcatcagttaatttataatctttgaaaagtccatccttcacacttgataaatataatgaggaatcactttgaagttcatgaacttgactttcagctctagtacctggactaataccttgtggtaaactaaacagaagttctgatttagtctctttagataaaacagattctggtgattcaccaacaactaattcagataattgtttaccccaagatgaccaattccatgaagaggttgaattttcagatttttcagtattattactagtagttattggtttaaagaatgaaccaatctggccaccaatttgttgtgcatattcaattgtcatattttcaattttctctaaatcattatcaagactatctaatactttatttgtattttcaccatatttatttaatatttcattactttttagttttaaattattaatattttcctcattaagataagtatctaatttttcaggtaatttaacctctggtagtttaacctctggtaatttaacatcagaaattttaacatcattccattgtttttgtaattcaggcaatttaccattaactaatgcttgaaatttactaataccattaattgttgattcttgaattgaattataagctttatcaacttcagattctaatgaattaactaattcatcagttttatcatcatgttgtgcaatttttgggccttcagcatgctcagcgtctttagataatgtgttttcaatagcttctggatccattgttactgttaatgaaggaaaagggtggtaataattaatgtgatgccatggcaatgcctccataataattcattttttgtgcgctctctaaagttaaaggtgcatgtcatggaatggtgatttagctgtaagtctttaaagtgatctgtagatttatctgtatcaaagacatcactttatttatgccatcccagatatttgttactccttcagtatattcaagagtagagagtagtttaactagaggttctaaacctattgctgccaatttcccatttttaaaagtttgtgagattaatacgattatagcattaacaccaatatcaatttatgaaaaagaggatgatgatttaattaaatttatacaagataatagtataaaatattatcattttgcaactgattcatcaggttaagaataagggtaaaaatagacaaataccaattacacatgaacaagttaataaaattttaagtataattttaatgaaaaattctggtaatatttatatttattgtaataatggaggtcaaataacatcattagttattgcatgtttaagaaaattacaattatggtcaaatgttagtatatttgatgaatttatttgttatagtgaaagtgcaaatcataatgatagatcatttgttgaacaatttataccaaatattgaaattaatcgtagtgaaaagattgaatggttatggcgtggattaaatgaaagtgttatattaaatcatccaagtttaaagcaaattgtatttgtagaataaaattattaatattgttcttcatattagaataacataccagcggccatatcaacattccattgacaagcttttaaggcattaagagctgataatttatcaaatcccatatctattcaaagtatttaatttagttgtttgatcatttgaaagagctgatgttgaagttgagtctgaagctggagcaggagcaggagctggagccttagatgattgagtttgaaatgatttattttcttctttctttacttcattattaacaacttcctgtatcatatcttgttttataccattttccttttgtaatttattaacttcccattcatttaagaattcaacaaatgtattaccaatgaaaataccattttcattcaaatcgattttaactttaaatcttttcatccaatctaaaccaattaaaacacctggaccatccattgctaaaactgttaaacttgttgcacaagattcattattaattataattggaactgaatgaattctaccattactttgcatttcaccaacaccttttgccttcatttgaaatcttgtatcaattaaatgtttaatatcacataaatcacataatgcaggtgttattaaagatctttgagcaccagtatctataaaagcaggtaattctttaccattaattgaaattttaatatataacattgtaacatcagcaaaaaattcaggagtttcttcataagcttttgataaattatcagcaattggatcgaatggtgttataataatccaatcatcattttgaacatttgaagattctaaagttgttttatctgaaggtggcaaaatattaaatttatgagttaaagtatgatgagttggaggtaaacctgtctctgcttcaacataagctgaaacatcagctaaagtcattgaaccaggtaaatcagcactaaagatagtaccattataatggaaattaagtttcattttgcttaatttaaaagaaaagaaaaaaagaaaagaaaagaaaagattaaatgattataaatgatatacaaagatattattagattagatatagatacatgtagatataggtatagagatatatagatatagggttattataaaggagcgagcattgtaagtgttcttgaactaattaacatacgatcagatattgaattatctggtgaacctgcaacttcagtaacattatccataactaaattaaccagatcatcaaaacctacaagggtaccttcataaacgtgacgatctctaagataaacacgaagttttttaccaacacactgatctagcagttctaatggtaaagtcatagtttcagctggactgggtgttgtagtttcagacattatgtatgtgtatgtgtatgtgtgtgtagagaggtgttattgcactaactgctaatcatatactaatcctatacactctatagaagacattatacagtgttaaaagtgatgaaaattaaataatagtgtatatagaatattacgtaatacaatttagtcattcgcggatttattaagaggtattaatataatataaggttggtatctagggtatatttatttatttattgattgattgattcatttattgattcatttaactacaactttcttttattatccacaggactttcattgataatgactcgtccttctcatttatgtttaagacctcttctcttagaggatatttctcaagttgtggaattagaacatgtaggtttccctcctcatgaaagagcttctcctctacgaattgaatatcgtcttacaaattgtcctgaattatgtagtggtttattcattcgtaaatttgatgaaaataaaatttctaaaaatgaactacccgatcatagtaccgttatttcagaaactttaattggtcatgtaattggtactaaaatgttatctgataaaattactaataattcaatggaagttccaaatgattttatttcaattatgtgtaataaagatggttcattaatggataaatataaatctgaaagacttattcaattagagaatgaagaaaaggaaaaaattgaaaaaaatggaaataatgaagaagaattaacatcaacaacaacagcagcagtaaatgatgatgatgatgatgatgaatcaaaggatccaaaacaatttggtcattttgataatggtaatacaattggaattcattcagttattattgatccaaattatcgtggattgaaattagcaactcttttattaaaagattatttacaaaaaatgagtcaacaatatgttgctgattcaattgctcttatatgtaaggaaaaattaattcctttctatgctgatatcggattctctgataatggtattagtaaatgtaaatttgctggtgaagaatggcatgatatgactattcatttagatcatgaagatgatgaagattaattatatatatatatttaatctttcctcgatatatattttactattgattaattgatttatatcgttaaatcaatacatttagtatttatataaataatatagcttttttataatctacatcttataataataataataataataataataacccaaggttttaaccttataattatccttatgttctttatatccgacaatcaatactataatttattaaattatctccgagtatttttttttttcaaattttttttttattttctttcattaacatgaatttcttttctttataaaattcatatatcttctttaaacaaccatggctacattcacatacgtcaactctgaaaaggcagacagaaaaaaaaatgctcctattaaagcttcatcttctaaatctgaaatacctacaaaatcaacaaaatcaaatgaaaattctaaatcatcaaatacacagacaactcatacaccagaagaattagaaaaattctttaattcaattcaagatgaaaagaaaaatcgtaaaattgctaaaaaggaagctcatattaatgcattgattgcaaatagagatggtaaattagaggaattagcaatggaagaatcaattggtgaaaatggtaaacgtgcaattggttatcaaattttgaaaaataaaggtttaactgcaagaagaaagaaagaaaatagaaatgcaagagttaaaaagagaaataagtatgatgctgctaaaaagaaaattaaatctgttagagctgtttatagtggtcaacaaggtccttacgctggtgaattaactggtataagtaagaaaatatcaagatctattaaacttaattaattttacatatattatttacttacattcatcattttttattataaatcttttctatataacaattttaagcaattcttcccttaatttattaacatctttatcttcccaatcttggaaattaagttgtaaaaatcttttcatcttttcactatctttatcaattaaattaatctcctcttcatctaattctgaaaattcttcaattatattaccacctctatcaattatatcaagtataaattttgccttttcaataatttccttatcgataccacatctatatgcacaatataatcctcctgaatcttttgtaatcccatcaatcatctcatataaataagtaatatcaaatttcttatcatcattaactaaatcactatcaatatcttctgcaactataactttcatttgtttgaaattaatcccttcatccattccaatcatatcaggttcaaaaatctcagttaaatgtgtacttattaaaacaattggactttcccttaaattaagaaaagtatttaattatactacctaataatccaggtccatcattgacatctgtacctttaccgaactcatctattaaaactaatgaatctttggtatttttatagatacatttactcatttgttggcaatctttcataaatgtactttgactacaattaatactatctaatgtattaattcttgttaaaatattggcaaatattttcaatttcccgaatttagctggtatataacatccaatctgtgtaagataaatagttataccaatttgaactaatattgttgatttaccactataattaggtcctgtaattaccatcattttcttatctttatttattttgatatcattactaataaaatcttgatctctcataagtatattaaatgaacccgtcaaagtgatgcaattcagttcctcttcatcatcatcatcatcaattatctcaggtttggtaaggttaaaatttttagatactaatgcaaagcagatcatcacatcaatttcacctataaatggatatacatctaatatattattcaaccccttattgaccaatctatttttcaattcatatagtacttcaatttctttatctcgtattaaagaatataaatcaccgaatctttcatccatctctctcatggtttcattcttataataaaatgtagttgatgtattgaaaactatttcaaatccttcatattcattagttttcattacccttttcaattgctattaaatatccaaattgtggaatatatgcagttattatctcagttccaaatcgattagttaattgattagatgtttctagtaatatacttttccattttatcaaaattttgttgtaaattttgtaattctgcattataaccaaattgaatactgacattatcaatatctgattcataatcaagtacacgttcgagttcacttcttaaccttcttactaaatcaacatcaatattttcaatatatttcctgaaaactttacattttaataatacatcactactgtcaataatatcccggattctaatcatgtttattaaaaacactcttaattgtttccatatagtacctttaaattctccaacttgtaaactattcactactttgcaaatatcaggcatggttctgatacaatctaatatttgtcttattattgattgtttatatccaccttccatttcaaataaaatcgatgatataatgtctaatctatcatttatcttcttcttatcatataatggtctcatcagatattcatttagtaatgattttccaattctggaaccacatttatcaaacaaatcaatcacgctctttttaccgtcttcaccattagataaaatgttcaatgaaaccatactatctaaatcaatttccatatatccgttaagtgaatttagttccattgattttatcatatctgtctttctgtaactatgatgattcatattcaatatttcaaaatttagtgataaagcagatatcaatccacactgtatttagttattttcaatgttagtacttttattcgtcattattgtaataaaatatgttaagacttacataatatctataatcatcttgtgattctaaacgtatcaaaaatgatatgaaatctctatcaccatcgcttcgtttgagctctctgagtaaatcattaaaaaatatttcaccttcacaactactaaaatctttatttgccttaacacttagtttaacaaaaaatccaagatattcttcactaacattcaaactcatcttcactttactattgcatattaattcttcaggtttaaactgattcaaaagatttttcatgatctctgaatcatcatttgttctactgagaggctcaataaattgtactttaagtgataatggatcatagtaacaaatatagtattttccctcggtgaagtatattaccattatcgatgttgatgtgtgatttgttgtgttattagcggagtcttcttgttgtgtaactaagtactcattagtgcttaatatcttattgaaattattgcctggaggctcagctgtcgttagtttcagaatcgtcatctaatatacttgaaaagggacgcttgttgcgcaattgtgatctgctctttgcaaagtaactactactagtaggcatcattttaggatagacaaattaaaatagtctacctaacaaatagaaaagaaatcaagattttcatgaaagtagttgaaagtcttatgttaaaaaaatttcttgttacttttgctcccttttttttcctttcaacacttatttactgaaatattcatcattcatcattacattttcagtaacagtaactaatagtagagtataatgccattaagtcatattgtaaatcaatcttacttcttcctgaattctgatcgaattgtcctcaaacgtacatagtaataataatgagaacattcttataaaatcgggtagtaaccttggatcaaaaaaccagaaaccatcctctaaatttcatcatgatcctgaaattccaataccaaaaccatcaagccttttcaaattagatacagtagcatctgacaaagttctgacaaaagaaactatgaaatcttgtaaaatttcccgtgtagtgttgatttcctgttcagatattcaattgcttaaagaaactgtattcaactgtactgaaagtaatgatttcattataagagagtatgtaattggtggaaaaaaagttttatttgttggctggtataacatctccaatgttgagcctcagattaacataataaggaaaattgcatttaagcaccgattaactgatattaagtttgattgtattgaaactgataaaatgtatcaaatagtaacatctttttctaatttcaaaatcttagacaatgtctttgatacagtatttattcatgttgttccaaatgattaaattgaatatttcactacaagaattgaatcgtttaatattaactaatttttccaactatgggaaaatacacaactttaaacaaatagatgatttgccgatgtgttttagagcaagattttctaatatcagaaatgcattcattgtatcaaagataaaaatagttcaaatattcaaaatcaaaattttcacatttcatagtataattgaattggctgactatttgaaaacaataaaagtaaataattttaatgaaacaactttaaaatcaacctctgtggctgaaatgaccaaatatagttggcttgttaatagacatcttgatttgaatcagcatgagaccaaaataaatttccaaaaaagtaatgataatgaaatagacaccactaaaataacactgaatttagataaaagagtaaccatcatgattaaaaacattccaaacaaaatgacacataagaatttagaagattttgttgattattcaagttatggaacatatgagtttttatgtaagtattcagttgcattgaacgaattcaaactaaagaagatatatactaacttatcaaattttaaaaatagacttaagaattgattttgaaaataaatgtaatgttgggtatgcatttatatcattcaaatcgcctcatgatataattcctttctataacttgagacacggtaaaacatgggcattattcaattccaaaaaaatatgtcatcttgtgtatgcaaaaatccaaggattgaataatcttattgacaagttcaaaaattcagatctgcttgtacataaccctcaatatggaccacgattttatcagacagatagtttggaaatgactgaaaagtaaaactgttgtaaaaatagagtaaactttttgtaatattatcatgaaaaatctataaagctgtttagtaaaagtaaatatattatttttgaggttattttgggttttccttcgactcagactcggattcagattctgaatcaccatttagttcaaattccttgcatttctttaagaaatcaaccatagattgggtatccactgatgcatcaagaaaatcttttggaacgtgattctgactatgtgcttttgttgcgaaccttccactattatgttctgtgactaatctaaacttgatgtcatcttctgatactgacatggtagccaattcattccaactaaataacaaaggatctgtactcctttgaaatgggtttatatcaatcaaataaactttgttgaatggttttggaacataaacatcaaaaacgaagctattagcttcatttttagaaagtaaaatatcatcgaaaaaaattcctattttttcagttaattcatcttgaagttcatctaagaagttataataatttaaatctctttgagaaatagcaattaattgtctatccctaacaaaacaacggaattccatagatggattaatttcgacccatttcctaagaactaattcaagttcaaattttggtgggtttgatttgtcaaaatcacaggcctcgtcaaatgcatggtacatgtcatgatttaggtaatctgatgattttaaaagtaagaataaatcagttgtggaatagcatctcatatttcttccagtcataatccatacagagtcttgaggtgcggaccaattgagtttaggtgcaacacttccaaattcttttatcttctctcttaatgtgagatggaaatcctcaaatttcttgattgactcatcagttcccttttcattatcatcattttcccaatcactgtactcattgtcactattaggactaacatcttgaaaaagaactgaatccttttttgtatcttttggaagttctataccatcactttccaaatattcaatgaattcctttgaaagaggtttataaatggcagcttctgaaaaagtgtaatctttaaactttgagtaccaatttgagtaactacagctcagtatatcatcaactgtaatttttatttcagcaaattggccgtcttccatcgttttcctctgataaactataaaaatctataaaaactgcatgtaattagtaagaaattctcaagaattttcatgctcttacaacaattttttccaattttgcgaaaattgcgagaatgtccaactggaaaagatttcatgaatttctataacactttgctctctgaaacttttcattatttgcactactaattttgattcattgtaattgatctttattcaaggacaacttcaaaaaaacatagataatgtcagctgtagtttctaacgctactttcaaaaataaagaaaaaccgcaagaagtccgtaaggcaaatatcactgcagctaaggcagttgccgatgcaattagaacttcattaggtccaaagggtatggataaaatgattaaaaccaagactggtgacgttatcatttctaatgatggtcacactattttaaaacatatggcagttttacatccagcagctaaaatgttagttgatttatcaggtgctcaagatgttgaagctggtgatggtactacatccgttgttgttatcactggtgctttattgggtgcagcacaaaatttacttgataaaggtattcatccaactatcatatctgaagctttccaaagagctgcacaaagatcatgtgagatttatcttgatatgtctcataaaatttccttagatgatagagaagctttaatcagagctgcaaatacatcactttcctccaagattgttgcgcagcattctagtttattgggaccaattgctgttgatgcagtactaaaggtcaccaaaaaagatgctagtaacgttgatttaaatgatattagattagtgaaaaaagttggtggtacaattgatgatactgaaatgattgatggtgttgtcttaactcaaactgctgttaaaaatgcaggtggtccaatgagaatggaaaaggcaagaataggtttggtccaatttcaattatctcctccaaaaccagatatggaaaataatattgtcgttaacgattatagacaaatggataaaatcttaaaagaagaaagagcttacattttaaatatttgtaaacaaatcaaaaaggctaaatgtaatgttttattaattcaaaaatcaattttaagagatgctgttaatgatttggctcttcatttcttatcaaaattaaacatcatggttgttagagatattgaaagagaagatgttgaattcatttctaaatcattaggttgtaaaccagttgcagatgttgcatcatttactgaaagcagacttgcttcagcagatcttattgaagaagttgaatcatctggatctaagataattaaaattacaggtattaaaaatgcaagtcacccaacagtttctgtgatatgtagaggtgcaaataatcaagttttagatgaagctgagagatcaattcatgatgctttatgtgttatcagatgtttagttaaagaaaaggcattaattgccggtggtggtgctccggaaattgaaacttcaagaactttattaaaggaggcaaatcaattatcaggtgcagaacaattatgtttaactgaatttgctaaagctcttgaagttatcccaactactttagccgaaaatgcaggtttaaacccaatcgaaatagtaactgatttaagaaataaacatgaaaatggtgaaagagaagcaggtatcagtgttagaagatctggtgcaacaaatacatattcagagcatgttttacaacctgtacttgtgaatacaagtgcaattacattaagttcagaaaccattaaatctatcttacgtattgatgatattgcaattagtcgttagtatatatctgtgtaacctatttataactttaagctaatagtaaaattattcgaatactattacgttgtttaggcatgaatgtagttaaatcgtaaatataaataaataaataaaataaagtaaagtaaattaacaggggaaagttaataatgggaacatctataaacaaattgtaccatgaaagattttatttgacaaatttgacagcatttttactaaacacataactcaaaccactccaaatagtagtggttgcaactgtccattccaaatattggatgtaagtaaggaaaatgttggttgtttccaaaccaaatctatcagctaagtataacatgaaaacaggtttaatcatcattgatcctaaataaagcatttgcaatgatgtattgatcttacttatcatagtagggtgaacttctgcactgggtatactaaaatcccaatatctccagaaagtttttggtggaggtaatgaaagatatctaataaaaacagcagcaattcccaatccaacatctctaccaataattatagctgcaatatagaatggaatttcagaagtagtagctaaacaaactgtacatatcatcattaacattttgtccgcaagaggatcaataacacttccgacaacagattgtaaattccaacgacgtgcaataaacccatccaaaaagtcagtgacacatgaatacgtaaacaatgataatgctaaagtaacctgtccgtgaacaatcagatatccaaccgctggtgcactcacaagtctagtaaatgttaggaaatttgggacagtgtaaacattttcatgaatatctgcaggtattatcttctttatgtttgcactcaagtcttttgatctttgtatggttttcactttcaaatcatttgaaatgttagtcatttgatctttatttttcttgatcatttctttaccttctttcaacactctgttgctattagttttagtatctttgattagtttttgagcatgttgtgaaatcgtcgttctgtcagcatttttgatagttttttcttcatttaaatcatgacagtcttgtttttcctttaaacatatacttgtagaaaattgttgtcttctataaaccacgtcaaatccaaatttgacgggatgtgaaaaagattttgtaaaatatcttgaatactgtatccccaccgttaactttttcaacccaatcataactgcaatctatatatagttctgattgctttcaccctgttatagtggatgtagaacactctatactaatcataataaatatagtaactatactcccaatctataagaaatttcaaaatttcaaaatcggttgggttcaagtttccatgcaggaattcgcaacatgaattaagctttgggatattttcaatttctggagtcatcttctggcatggactcatttcctttgaattaagtagaagtttatgtggtttaatgctttttttggggtttccaacaattcatctgagaactccacgtatttataagacattatttaaattttgctcttgtatttgtttatattcttcagttactccccttcatttttttaattcatttaatttgaaaaatactaaattcaattattccttaagcaagcaaaagatgtcatcgatgaatgtgctagtgtattccggacctggaacaaccaaaaattgtgtagaacaatgtgtgaaaactttcaggctcctattcactccttactattcggtttctacagcagatgaaagaatgcttgaaaatcaaccatgggaattaaaaacggcattgttagttattccaggtggtgcagatctacctatgtgcaaaactttcagaggaaagattaatgatcgtattaaatcttatgttagtaaaggtggtaaatatattgggatatgtgcaggtggttattactcatcttcaagatgtgaatttgaactaggaaatccaacaatggaagttagtggacctagagatttgaaattctttcctggaccatgtagaggttctgttgtgaaaggatttgattatggaactgaaaaaggtactagagcattggaaatctcagtgaatttaaatgaactaccaaatattgctccaaaagttcctgtttatgttaatggtggtggtttgtttgttgatgcacataaatatagaaatgtcaagattctagctacatatccagacgatattgatgtcaatgataatgtaggtggctcaaatgctgcagctgttttgtgtgaagttggaagaggtaaagccttactttttggatgccatcctgaatttgatcccgatactttagatgataattctgaagttccttcatttgcacaagttttgaaaactttaaaagcaactaataactccagaatagattttttaagatcttcattgaagaagttggaacttaaggttaatgaaaaagaaaatcatatgcctaatttaacgcctctatttctttgctctattgatggtgcatctggtggaaatttgataaagtcacttgaatcggaaataggttatcaaattcaaaatgttatggatgttggttctgataaatttgcaattaataaatcaatgaattatgtacacgaaaccgaaaatgtacgagctgttgaagatcctagtcttgctatcaaacaaatttttttgtgtgaaaatgaaacaccggacaaatatttaactccaaattttgatatcgaaaaatttaaaagatgcttgacggagttttatgagttatcaaatcaaaaaatgaatgaaaactcagtaggtaatacttttatgtatggtgaggttcttacatccaccgtctggtttgatggatagcaattttaaatttttgccattaattcctgacggttttacaatcactggtacaatccaacttttaggtaaaggtagatctggtaatcattgggtcaatcctaaaggtgttcttccagtgtcctttttactgaaaataccacaaagtatcactgcaaacttcacctgtggtttttattcaatatttaggtagtatggcatatactcaggcgattttagagtatggtgagggatatgatgaacttcctgtcaaaattaagtggcccaatgactatttacataaaatatcctaagtatgttggagaaaacattaacaaagattctaaagaagttacgcatactaaaattggtggtattttggttaatactaatgtattcaatggagtattctacttagtcctcggtgcaggtgttaatgtgagtaatgaagcatccaacaacatcaatcaactcggtcattgatgctatgaatgaatactacgctaaaacaggtaaaaataaaagattgtctcatttagaagaagaaaaattattagccaaatttcttacaatattcaaccaaatgtttacaaagtttaaggttgatggattcactccattcttgaaagattactataagatgtggtttcattctaatcaaattgttacattaagtcataaaaatggtgcaaaggctcaagtctgtggtataacacctgactggggtatgcttaatggcaaaagatctcaaaaccggaactatctatgaattacaaccagatggtaactcgtttgatatgtttaatggtttgatttctcaaaaacgttaaactaattaatcttgtataatatggcaaaacctttatattcattcctgaatctataatacttatataacatcttagtcattctctttaatccgtccattattaaatatttagtatatttggtagtttcatattatctagatctaagtaacttaaattcttttgtctagtaattcttcaaaatcaatagtttttactttttaggtggctcgtcaaacatagaaaatactccaattttacctcttataatcattttattccaaaaaactacacacattactatatttacaggtaataacagctactttcaaatctcataaattctttagcaagcctatagcacctactaatgctaaaagttactgttttttcaaacttttcatgacagttagattgttgtatatttgtaatatctcaaagtaacgccgcggagggcttaattgaattataggagtttttactcatgataactcttgaattttgttatcgaaagtccaagtataatggagcagttaaatgcgattaaactattataaaaaacaaaaacttaaacttttaaacgttaatttattactaaaaacagaagtatacacgatttccaagaaaagaagctaactaaatatgaaaaatatttggggtgtctatgaaaatgacaaaaactgatatcaactttaagattgattgttactatcagaagaattatgttgtggagaggttggggaatattgaggagatgtaggggagtactgtgagtgagatgttggagagtactgtggagatgttggagaatattgaggtgaggttggggaatattgaggagactgtaggagaatattgaggtagatgtaggggagtactgtggtgaagttggggaatattgaggtgaagtaggagaatatgatggagaaggttggtgagtattgtggtgatgtaggggaatatgatggagaagttggggaatattgtggagatgtcggtgagtatgaaggagaagttggtgaataagatggagatgtaggtgagtaatgatggagatgtaggggaatatgatgggagatgtaggagaatatgatggagaagttggtgagaatatgatgggagagttggtgagtaagatggagaagttggtgagtaagatggagaagttggagaatatgcaggtgaagttggagaatatgcaggtgaagttggggaatacgctggagatgttggagagtatgcaggagatgtaggagaatatgcaggagatgtaggagagtatgatggagatgtaggaccataacttggagaagttggaccatagccagcaaatggtgaggtaggttggtaagcactcatggaaccaccatattcggtaaaaccaccagttctatcatcatttgaacctgcagtaattaatggagagaatgcaacattatcatcacccagagagatatcaattatatcatccttcaaattatcatcaccataaacagtcattgagccgttattttccttcttttcaaccttaacaccaacagatgactctgatggtaatacagataatttatcttcatctaagaaaacgtcaaaagaaccagtaccaaatggtgccatttgtcccaaaataatattttgtgaaacaccatcacatgtatctaattctgctgatgcacctgcatcaaataaaatttcaacagtttcttcgaaagaacatctcattaatgcaccagtatcatttctattgaaaccatgtctagaaattgcaattaaatgacccttatatgtcattaaatcaaccaataaagctaaatgtctataattaacataagaaccatcgaatgcaataacatttaaaatttctttatataatgcacttcttgcagcttcaataccaaaaacaaataaaacttcaacgaaagagttagaatatgttcctagtagtatcaataccttcaacagatataacatcagctaaattaataccatcagtttcaagaacccattcttgtttcttagcgaaatctccatcttcatcaatatatgttttatcatacttcatcatgaaaactcttgaaataccactaacacctcttaaagtaatagattctaacatttgagcttctaatgcttttaataaaccatcttcagtttcttcttcttcttcatctaatgccttttcttctctaacaattctacatctgataactaatttatctgcattatcttcagaccaaataacaaaaagatcatcaccaaagttctccataatctttgcagcaacctgttgcatacttaattgtttatctaacatcttagctctatctaattctaatcttaaaagccatggagattgtttatgaatattttcttcaaccttttcatctggaattgcaaaatatgcatcaacagtatcaatatcatcttcaatgacagtagttcttggatctggatcataataaatttcagtacatgcagtaacatttttaagagatgtatgttcaattgcagattgaatactctttgccttttcaatatctgtggcaacatcttcttctaaataaactgttaatgcaggagttttgaaattctttgcaacatttaaaatttcctttaatcttggaacacccaatgtaacattcttagatgagacaccggcataatggaaagtattcaaagtcatttgagtagcaggttcaccaatagattgcgcagcaacaacaccaaccatttcaccaggattaacaagggatctagaaaattgatgttcaattgtaccaacaacccactcaaatgcatctttattaagtctatattcttccaaaactcttcttgttgacagtttagatctaataagacattggaataatgatgttgaattttgctttgcttcagttaaacaaccaccatcacctctaacaactgtgaagtttttacatagattttgaacagttgtaacaatatcagaaatagttaaatcacttgctttataacgatcgacgtggaaaatttgttgtgcattttgaataattctacgaacattgacaggtaatggccaattattatcaccatttggaaaaacttcagttctcagatattctctatcctttaattaattgttcatattcttcatctaaaaccttttgaagtttaatatcacctaagatttcgttaccatattcaatcatatcaggacgaattgacattttttcatccattaaatcaacacgatatttcttttcaaatgctttattagaaccaggaatagtatcaacagtttgtttttcaacagttgttgcatcaagaccatcttcaccataaatgaattgaataacgtcacctaaagaatttcttgtagtaccatcataatgaaccataatatcttctaaagcctttaacaaacgtctttgaatataaccggtttctgcagttttaacagcagtatcaatcaaaccttctctacccgccatagcatggaaaaagaattcttgtggtgtcaaacctctaagataggagttttcaacaaaacctttagattcagcagaataatcatcagttgtaaaatgtggtaatgaacgatcttggaaaccaaaattaatacgtttaccttcaacaatttgttgaccgacacaggcagacatttgagaaatattaatataagaacctttagaaccagcagtgaccatttgtttaacattatttgaattttttaatgatgtttcagcagatttacctgcagaatctctcgcttcatttaaaatttttgaaaccttttgttcaaaagattctcttaatgtcataccaggttcagcttctaataaattcttctgcgcatctttaataacatcttgaacttgatcttttgcttctttaattgtttcagtaattgttttcatagtttcaggatcagcaattgcatcaccaataccaatagagaaaccattatgaagtaaccaataattaacaactttttgaacattaccaaacattttagcacaaactgttggacccttttctctcattgtagtatgaattaaaccacctgcagatgcaccaatggttgatttattaacaacaccaaacatgatttcaccatcaagaattaacatacctgaatcttttggacatgataatggaccatctaatctttgtaagaaaataccctttggaatacataatgataaaatttgtttaccagtccataaaggctttggttttaaaattgcaggttgaggaatcacaccatcccaatttggaatccaataacataaattcataacttgatcatattcaataaatgagtctcttaatgtcatttttctaataccacataaagtatcttgaacaatacccataacaggtttattggattgtggagaaataatttgtaatggaactgcacaaagttcagataattcagctcttgtttcataagattgtggaacatgtaaattcatttcatcaccatcgaaatccgcattataaggagatgtaacagataaattcattctgaatgttgaatatggcataactttaactctatgacacatcatagacattttatgtaaagaaggttgacgattgaaaagaacaggatcattatccattaaatgacgttcaactttccaaccatattgaagttgaatatcacctgctcttttattaaatcttaaatcaattctgtcaccattatctctaataacatattttgcaccaggatgttcatttggaccatttctaaccatttcagttaatttttgaatattatatggtgtaacaatttcgggatatgttaaagttttagcaattgatcttggaacaccaacttgatctaattcaagatttggatcaccagaaatgacagttctcgctgaaaaatcaactctcttacccattaaattacctcttaaacgaccttctttaccctttaaacgagctcttatagatttaattggtctaccactcttttgtaatgcttgaggttgacctgcaatatcattatccatataagttgcaatatgatattgtaataatgcctcaaattcactaataacgtgctgtggagaaccatccatctcgaatttttgaacatttatatttgcctttaaaatatcagctaatttataagttaaatcatcttcagatcttttagaatcagtaaacgcaacagatggtctaacaggtggaggtggaacaggtaaaacagttaataacatccattcaggtcttgcccattcttcattaaaacccaatttttcacaatcttctgcagatatatgtctgaaaacatttaaaatatcagatgcagttatttgttttctttcaagattttcgatttcttcatcaacattagattttttccatgtaccccataattttaatccatctttacgaattgaaggttgtatactaccacaccctccacgtctatatcttggtggttcatcttcatcatcttcatcatcatctaatggtggatcaacatcacagaccattttggttttagataatgtccaaacagcattaaatcttttctttggatctctaattttaatagctgatgcaaattgtgaatttgtatgttcatctaataataatttaccacaattcatacaaacacattcacaaacttttttaatttttgctaagaaaccaatatgaaaaacaggtttagccaattctatgtgaccaaaatgaccaggacattcttgcatatcttctgaacatgtttgacatctgaaatttctatcaattgaaccaagtcttggatcatttaaacccccttctctgggtttcatagttacgggatccataatttcagggtattcaattttggcaacggaaattgatctagcttcttctggagaaaataaaccaaattggacctattaaaaaaaaaagtaaaatagtttagttagtatttaagttcgttattttaagatggaatggaaaattcaataaagacatacttcttgcaccgtccttagaggcgcactggaataagcaaatctactcattttgtattgtatttagttataatagtagtaataatgtaatatatgcagttagttttctataagatttttttttgatatttgtataaattaattattatctttttttgatttttttggaatgtataatataagtttttaatttggaaaatatggtacagtgatatgaaacaatgaattaagaattaagaattgaatttaaattaatttaaatttaaccttgaatttgaattagaaaaaaatttaattgcctgtgaatttagttatttaattatttataatcgagttattaatataattgtagattatttctaagtttattaaaattggaattgcaacgatcaaatgaatgagtgcaaagatttaaaatatttggaaataacttagatatgataatttataataatatttaagtaatataacttgatttattcttttaataataataagctaaaaagtattaatgatttattagtaaactttctttctctatgggtaaataatagattaaaagagatttaagattgaataaaatattggtgatatcgtattataatataattgaaaattaacttaatttaattttaataatatacaaatggaataataatataattcaaactttaattaatcaatagtatgtgtaaaaataaaacctttatgaaagaaatttaatagtacacaaatggcaattaagatgtgctggattcttaaagtgaaataccaaactcaaataacaactatgttgttgtttgaactgtcgtttccatgttgaatgcatttcgccctcatgaaaaaaaatggttgaatttcttcataacaaaaacttatcgacacataaaattttatgacagagtcgatcgtcgcatacattatgcactattaaggttactttaataatatacaagtagtaatgtagaagtatataaacaagtatacaagatggtatattcacaagttgagatagtttataactttgcaaagatatcatcaataaaactttcatcattatcatttttaatttccttattaggagtattttgttccatcatttcatcaatttttattctttcattaataacccaattaatttgaaataatactttcatcattgtagttttaaattcaccccaatcaccattactattagcgttattattactgttattttccttttcaataaacatatttaaatttaataaatgttttgtaaaatgtttccaattaccttcataatgtcttaacttttttgcttgtaattgtttatattttaatacttcaaatagaaaattcggatatcattctatatttatctctttttaataatgcatttttagaagttgaattaacacttttattatccttattcagaaacatttcaattctatccactgttgccttcattgcagattcaacattcgattgtttcctagttttacgctttttaacacaacttgttaaaattggtgatccatcctcagatatttcattttcatttataattagttttaggatatccataattgaaaaacccagtatttgatgataaatcttcaaaattatcatcatatgatgaaaattgtattggatcaactgcactaaattctaatgattcttcaagtgttctcttcataccacgtttattcgatgtatcaatataagctaatggatcaattaatttgaattttctataatttaatgatttattattcttagatcttaactttttctctgaataatcataataatcatcactatcatcatcatcattattatcaaaatcatcatcatcattaatgatttcatcatcagtttctgaattagtttttcttaagttctttccattaattgaaccaatattgtgatcattatagtaatcattattatcataatcatcataaagttccttctctgatgaattataggaacgtgaattcataaatgcagattcaattgccttttgtcttaaatttttagatgatcccttaggatgataaaattttggagaaaattcatcattttcatttttagattttctagcctttgatttgataattttagtagtttttgaaactttaccactagttttggttttcttactattcttcttatttttcttagtattactattatcatcatggaaataagtatcatcatcattttgatcatcataattatcattattaaaatcattatcataatcatcatcattatcaacgtcattataattatagctatcattatcattatcaatttcaactccaatttcattatcatttgcatttccatgtccatttgaatgagaattatcatcatcatcaattaaattatttgaatgaatacttgtaattaaagtattttgagattcttgtttaacaaaattcattcttaaatgtttcatttgagttgcaaattcaacttcttcacgtgtatcaaaatcatttattaaactaataattttttcatcatgtgaaggtaaagtccaatgaggtattaaattttttaaatcatacattgttggagaataaatcattgatttatgattaattactgataattcatttgctaaatcataatttgaattaattttttcattaattgaatttggaatttcaatattttcaatattaaaaggatttgataaaatacttgataatgataaatcagtttgatataaagtataaattaaccataaaaatttatcaactttttctgaagctttaaatttaggtctaagccaaatatcatttaataatgaaccagttgttgaaattttagaaattgaaggatcttgaatttcaaatgggaaaaaactttgaccaatatcatattcattttgacaaattaagaaaattattgaaactatattataattaaaagatttataattttgagattttttagcaattgaattaatgaaaaaattataagattttggtaaattatcagttaaatcattaacagattttaaaattgattttattcttggagtatcttgtaattgtttaatagttgacattgtataacttgtataatttttaagtaaatgagtaattgaagtatttggaggattatttgatataactcttggttgattataaatattacgtttaataatttcaggtgttaaattattttcatcgatattttcattatcattatctttactatctttatccttattatgtttatccttattatcatcattagtatcatcatcatcatctttaatatcttctttaacattataataatctttaataatttggaaatgattaccaacttgtaaagagggtattgaatgataagttctaaattgagatttcatttcataatcaaaattaacagttgtatttaatctaccaatattaactaatagacaaacaattgcaaaatttaaagcataattaatatcaatcattaatcttgcctttaaaatttttgaaattttatttgattttaataaagttattaaatataattcaaagaaagttaatatatgaccattattttgtattaaatttttattttcatcaaaataataattaaaataagcaggccaatcgaatttattattattaatattttcaataaaaggatttttgaaaactcttttattatttaataataaattaattaaaaattcaaattgaatttcatttctccaataaggttcactatcatttttcttcatatgtcttgaacgatgattaattaataaattttggaaaattcttataccatcttgattcattaattttgcaccattttttatactaatttcaatactattatgaatatttgttgaattattgttattatcttgatgattaacgatataatctttagcagttttattattatttttaatattagtatttgaattagtatttgaatcactactactattattattattattattattaatatcatccctatcatttgattgtttaattaatagatcagttacagataatggaggtgaattatttaatgtactgttaccactaacaacattattattattattattaccaccagtaggattaagtaaatctgagagagaagccatagtgaatatattatgaatatattatgctgtgtatagtagtatactatgtggtataagaaaagaaagggattaattaattaattaaagagagggaaatagaaatagaatggaaatagaaacagaaatagaaaatagaaatacaagaatataaattgtaaatgagtgcagccattgatttaattaattatctaattgtagcataacctaataatacacttattaaattaaaatatcaatgcaattgttgaaaataaaataaaattgaccaaagaacggaagttgcgccctttcaatttcgccattgggggaaaatttcattattttcattattttcattattttcatattttatttcagtaatttacgtgttgagccttgagccttttattttattttcttaaaaagagagttttccaatgattacgtaatataaccataatagattagattacgtaatgtaatgaaataccaacagacgcgactgctggaaaacatccattatcattacgtaatacagaatggaaaaaaaataaatacgagaaggctcagttacttatacttattaaatcttataactcacacgtgggaaaattataaggcaagtcattatttaaatttaattaattctttgttctttctgatttttatttgcttcttttcattcccatttaatatactcatatacccaattaactacccccttcctgagtgtaattgttaattaaaaattatatattatacttaacacactttttatttcctatatctcatttcaatctcgtattatcacaccacacactctttctcattatcattaataacttaataaacaattaaatgctgtttggagttaaattacaaaacgaaatttattctccttggaaacaatattatatcgattatgatcaattgaaaagattattaaaggaaaatgttgttaatcaattagatttaaatacaatttggactgaaaaggatgaagctttattcgctgaaactttagataaagaattagaaaaagtttattctttccaagtttcaaaatataaatatttagattctgaaatttcaaaattagaattaaaatctgaaaattatttagaatctttagaaaataacaataaaaataatactaactcatttgatgcaattactttccaaaaaaatttagaagatttattatctttagctaatgaattggatcattttgcaagattaaattttactggatttattaaaattgttaaaaaacatgatagattacataaaggttattcagttaaagctttacttaatgttagaatgaaagatttacccttaaataatatctcagaagatacttctccttaccttttcagaatttcaactctttattcttttattagagatcaattaaattcaaatacaatctcttcatctttatcaaattcattaaaggaatcttttaataaattatcaaattctggtaaattatcttcaactccaaatacaagtttacaaaataatggtattaatgattctcaatataaagttttgaaattttggattcatcctgataatttaatggaaattaaaacaactattttaagacatttacctgttttaatttataattcaaatattaatgatattgatgatgatgacgatgatgatgatgaaaattcaggtttggttgattcaacaattacttccctttatttcgataataaaaattttgaattatataataataaattattaaaacaactgaataaaactccttccttaagaattagatggaatggtaaattgaaacataattcagatttaattgttgaaaagaaaacttttgattatgatactggtaaatcagatgatgttaaattaactttaaaagaaaaatatatgaatgattttattttcccttcaagtgatgattcaaataataataataataataatgaaattgaaactaattttgacgatttaaatgatagtgaaattatcaattatagaaataccttaaataaaaagaagaaaacttctaaaaaattaactcttgagaaattcactaaaaggttatcaaagaaaggtttttcaaaggaaagtattaattcttatactaaaagttttgaaactttacagaatttcattaattcaaatcatctggaacctgttttaagaactatttacactagaactgcatttcaaatgccaggtgatgatagagttagaattacaattgattctgacatattatttatcagagaagattcctttgatcaacaaagaccaatcagagatccaaatgaatggcatagaaaagatatcgattcatcaattgataatccttattctttattaagaagaggtgaatattcaaaattcccttattctgttatggaaatcaaaatttcctcatcaattatgaataacccttcttcaagaactcttaattggattaatgaactaactaattctcatttagttaaagaagttccaaatttctctaaatttattcaaggtatatctgcattcttcttagaagatgataatttagatattttaccattctggttacctgaattagaatgggatattagaaaaaatcctgaacaagcttatatggattcaaagaataaaaaattaaaagaaattgaacaagctggtgttttgaaaaatttgaagaaaaaaattggtaatgcagttcaaactcaaactgatacaactgatattcatttagatcaaataattgaattaaatgaaggtgatgatttagatgctgaatcttcagatgatgaaacttctttacctccttcactccaaggtaataataacaacaacaataataatataacttcaaatagtattttaactccactttcaagtggttattctgatagattaccattagttccagaatctaataaaagaaaacaaaatattactgatgttttaatgccagtttttggttcatcaaaattagaaggttatgaatcagaggatgaagaatttgaactacctccaggtgttgttagaccaactcaattaattcgtcaatcaggtcctgttagagttgaagcaaaagtttggttagcaaatgaacgtacatttgttcgttggttacatgttacaactttattatcagctttaacttttacaatttattcaagtgttaaatcatctcatttccctcaattagcaactgatttagcttatatctattttgctttaacattatttagtggtgtttgggcttatgcaatttacaataaaagattagatttgattaaaatgcgtagtggtagacatttagatggtttatttggtcctttagtacttgcaggtgtattaattttaacacttgctttagaattttttacaggtttgcaaaaatggaaagttaaagcaggtgtttcttcaataaatgttttattagctgataatttgtcaaaatctattgaaaatgaagatatacacccatttactcgttgggctttaacaaaattattttcattatgttaaaatttcacttctaacatctactctttaattatctcttgttcttaatattattattattatctatataattactctctaaaacaaatgtcattttttttaaatatacaatcctcttttttgagacttctattaatacattctttaattatttattatcaacaatacctttaagtaaatgtttcttgatatgcttaattctttcctcagttaataaatttttgttatattcattagccacaaagtttgcactagatacagaatttattgaaatattagattgtttagacttttttgaacatcctgaaactcttcttaaacgattattcaaagttgcagtcagtaatggtgataatttatctaatttattttcatcatcgtcatcatcattaacgtccgcctcctcatcatcatcaacaacatcttcattattacacagattatccatttgaatatcagggatttcattattcatatccgcataacattcaacacaagttaaccaaatcttacatgcaattagaagattaaattcttcaattttaacaatatgttcaatatcatatatttgttccaaatttttccttaataatagtaacccatatgtaaatttattaactaatgtgatgttctgacaaataaataatggataaatcattggtttcccacttatagtgttactattttctttcccaataggtaatgaataataaccggaactggaaataggatcatgaatataactagtagatcctaaatatttaataggatatcgtaggggtatttgtaaaatatctgcaattttggaaattattaaaccaatataacctattattgcatttaatctttcggattcctgttttgatatattcataagtttttgaattgttgatgttgaaactatcgagtaaggaatttcatttattgatagtcgatattgtggtattaatgatgatggatatgatgtattgaacaatgtgaatgaaaaattgttttcactttctttaattgggaaaatgtattgaataatcgatgcaactcttgatttttcaatattaataagctttttattgtttttaatatcaatttctaacttacatatttcctcttgtacatctgtttttatatcatctttagcatttttgatgtttgaattgattctatctttaatttcattcatttgtgatatcctttcctttaattgtttattatgaagtttacgcttttctaatattttagataattgatttatagaagtatttgtcttatttaaaagatactgattatttctaaaaccattattattttctaattctttgtctattttatttttcaatacttgcttggttatcaataaatcatgaatacatttactgtaattatttatcactctaatttgatcatatgtacaagaattcgcatgatatgccgtcatatcaactctttccattatggaatcaaaataaacagttttcaaatattttatagcttgagtaggtatactagtatttggtaaaatataataacaaccatcagtcatttgtaaaatcaatagatttttccttcctttaagtgttttcattatcaattcactatcattacctatgtttattagtaaagataacttaagatggtattgctttaataatttccatcgatcatttttgaattttgcaaaaagatttatagttgcagaattggagaatattcgtagttccagttcatcatctagttcaacgtcagagggaaaagtccggctaataaaatatggcttatctatattcaaaaaatcgtttaatgtatagaaagattcaactatttcattatctttattatactgtaactccaattgtctttgtatttcaataggttgctttaataaactcttttcgtgggtcaaatcatttttacctttattactgatgaaggtatcttcactttcatcatcactgtttccagggaatgaatgttttaaatcataagttgatttcccctttcttatcttatgcatactactagatcttgaaactttcttagtaacatggtttattatctctcctgtattatcatcttcattatcagtatcttcaaaactgatatttttagttgtcttagctctgtttatcttctgattaccctttttcacattcggatcttgatgttcaatttcacagatattttggataattattgatttgatatgtcgtatctttaacagcctcggagatatggatgaattcaaagtgattgatgattcgtcactatccttcacatctgcaattcctcctctaaattgcggcaccgatgtcattacctcccaagtatgtctcctactataacaaccaattcaatagataataatttactttaaagcaatgtctaaatcgagttactacccttattcggctaagttacccttttgggaggatcaaaaaagttctcagatttgacatcaacaagaacttttctttataataaacctttaataatgattgattaattgtgaaggataaaaaggaagaaatcatatcgatcaaactagatgacttttatagtatcggtagctcatttttgtgaagtgcatgggccttcaatgattatgtgcacacaagtggtgaatgatccaaaagatttaccttcgttttattcaccgcaactaccggaatcacaattttgtcaatcttgtatgttccaaattccagatactgaggaaaatttacctgatacaagcagtacaataactaaaacaacaactgcaacaacgacaacgacagtctcctcatcaaatggtgaaaaatcagttgaaaacaatactaaaatacccaatgaaaaatcaacatcatcgtcttcggaatcagcaataccaaacggtgatatttcacaagaatcaatatcaaaagcttctaccccgtcaaacctagaagaccaaatatccaatttacttaatctttcaaataataaatctgatcataaaaagagattaatgactttaaagactgtatctaaacgaaataaagatacatttttcatatcaactcaataccctactaatactgaaagatatgcatctctacgacagactattgtgcgtgtgtttacagctgaaacaaatgcagatttaaggaaaccgctaatgtttgggaattctaaacatggttattcaatggctctggtgttttcactaagtgataaaactgcaagaggttcagaacgtaaatatgcaataattgtaacttcaaattgggaaattgatttagtcaaaaattatgcatttatattaactaatcttaatcaaattgtaaaacacatattgattagtgcaaggaaagtacagaaagaaattgatctttatagcggtgaattaaataatactgatgtttatttaaggagatcagctggacaaccaaaggcaaagagtatggtacaaatattacaagatgataaattttttgttaaacttcatatgtgggcttcttttatgcttgatgcattagaggagaatagacatatatgatatgtacataaactatttttttatagatgattaattattaaatttgttatattcaaagtttaaaataaagcaagaaaatttaaagaaaagatttcatataaggattagttcacacagcttcagcataacctctaagatctaatgttaatattttcgaagaattaacatcttgatctctataaataccaaccaatgaatcacttctctcaaataacatatttttcaaactaataacaataaattgaaaatttggtcctctatgttttgtaatataattagcaattttatcaacattagcattatctaacgctgcatcaacttcatcaagaacaaaaaatggtgatggatgaaatgaatgaattgcaaataataatgctaatgcaccaatagtcttttcaccaccacttaaattttccatatctctaaaacgttttaatggaggcataatgtgatattttataccataagagaatggttcctcttcatcttctaaagttaaatatgcagatccacctaatggtgaacttcttgactgtgtcagttctttataaacttcatcaatattattagaaacgtgattaaatgctttcataaataaatcttgtctttcatctcttatcttttcaaacttttcaacagtttccttctctgcaagtttagcttcattaaaatcggactcaacttgtctaaatttctcttgtgcatcttctaaatgttcacgagcatgtatatctggatgaatacttgctaattcttcagaaagttgttctattcttaatttacatttttcttctatatttttagctgaatattcaactttttcagatgtctcatcatcatcttcttcgttatcatcaacatccatttcatctccatcttcattttctataaatacacgatactcatcatctaatttagagtaattgatatccaaacgattaaacaaatcatcccattcttgacttaattcatcttgttctatattatcatcaatcaatggtaaattatctaaagatccagatcttaacggaattttaacattttccattctagcatcaactaaaaggttctttttctctaactttaaagattctaattcctcttcaatattattaatttcctttttcgtttgtttgatttcactcttcaaattattaataatagtttccatatcagttgttttagataatagtttcttagccttttcattcagcttcttatatttctcctttgtttgatcaagttcagtttgtaatgattgtatttcagattgtagctcatttaccttttgtaaaacttcttgccaactttcataataattatttttatcttcaaacagtttctcaatatgtagcttatagtcatctaatctttcagtttcaaattttagtttgttttcttgtctttgaatttctttaacaaatttagaattttcatttgcttctttgattactcttgaactataattgatttcatattctttgatatttttaaacgaatatttctcacagaatgatttataaattttattttgattgactgataattcattgtttaacgactcaagcttcgtatcaatttcatttatttcttctttcacattatttattgcttcaaaattttcatttagaactgtattttcaaattctaattcagtatcaacatcacgtaattttctttcaatttcatcaatgtttttatttatttcaggtacttgagattccaacttatttatttcatcattcaaaacacgatctttaacgtcatcaggtatctttgaatggatttcaaaaattttcagttttaactcttccttacgttcatttaatgaacctaattctgatttatcccattttgtattgaaattttcaataccaccacctgtcattagaccacttttatgaatcaatgcaccgtctaatgtaactaatttaacattaatatttctaccccaacgtaatgaagttgcaatttcgattgtatcacaaactaatgaattaccacaaacatattgaataactctttcaaattctgatggataagtaattacatcaattattggctttgcactctctgataaattacgtaaatttgaatcaagtggttgaattttaatggtatttaatggtataaatgatgcaacacctaatctttgctctttcatatattcaatacattcagttgctgttgataatgtatcaactataattgaatcaaaatttttacctaaaattgctgccagagcaacactatattttttctgttttggtttacaaatatcatttaataaacctctaacgttcgggaataatttttttaatattgaacatgtttctctaagttttttctctcttttattttctctttgtactgcattaatttcatttaatctcagaagaactgcttttaattcttcatttaaggcagattctttttccttaattgaagaacgtaatgaatctaatgaatttaattcttttctgaaatttttaattgatgattgtttagattttaattgattttcaagttgattaatttttgtttgataaatagatttttgagatttcaaatcgtttactctagcattgattaataattgattagaactcaaagaatcaattttattattcaaagtgaatttatcttcgtttaaatcatttacttcaaattccaaattacctgcaattgataaaaacttgtttcttaattcattatattctgtcaataattcaatatttgatgaaaatgaagaggttttattttcatcgttttcatcatcatcattttcttccatattagactcttgaaacaatttaaatgcatcatttaatttattgagaatattttcattatcttgaacaactttcaattgttcatcgctttcgagttctaaacgtttgattctttcttcgaattcatctgatttttcctttaattgtaaagcttcagattctaaaggtattaaactaactttaagagactttaagttaggattcatcattttcaattttagtttcatagtttttaattgacatatgttcatcagattgtgtttgaacaaaatctttatattcattcatttttatttctaagtgaatttgaaatatcatctaaaacttcatttttttcattaaagatctctattcaatttaacaccaattctttcattataatctaatttggataaatatttagtaatcattaggttttctaactttttagttttttcaacaaattgatcagattctaaacattttagtttcaattttttaatatcatcctttagattccttcttaatgaatttttcaatgatgtttcatcatgacatttttccttttcatcacgtaaagtctcatattgcttcttcaaattaattgagccactaatattttcaatcatattggttaaatctaatggagattgggatgcaactttttcaacatcaccttggaaaactaagaaatttttggcctttataagtatattctcctcttttaagatttgtaaatattgattaacagaaacatttacaccattcacagaaaaagaacttgaaccatttccattaatcgatcttttcaaatttaatatatccttattatccttttcataaattgcaataacatatgcttgattatcatcattttgtgaatcattatcgaattcattatcactatcaatatcattttcatcattactatccatatcattaccaccttcaatatcatcttcatcattgatacggccacgatagatcaatgactttatattacgtgaacgtaattgatttgatctaacacctaacacgaaagaaattgcatccatcatattactcttacctgacccatttggtccaataattgaagtaaaagcagcagttccaaacccaacttgagtcttacccttgtatgatttaaaattacacagttccagtccaacaagtcttcccattatatccttttaccacaggaaacactaaagaaaaaggtgtacaaaatgtacacaaaatgccatttcagctgagcattttgattgtaaattaattttacgcgtcttcctttatgtgacctcttactaactgacatcctcttctttaactagacaatatcgatggtatgtatacgagtgtatatcatgttggacattgtatgaacaagcagtactaacaatgaacagagtcaaccattaacttccgtttcatattgtataggttcattagccttagttggttcaactatggcttatattaagaaaaggttcaattccatccttattatcaggtggtttagtttcaattatttattttattggtggtgcattaactaatgcaaatcgtaaaaacggtttatacgtttcattagctgcatcagttattttattattagctggtattggaagatgttttgcaacaagtttccaaaaagccgttcctttagtattatcaggtctcggtcttttatctacactttactttggttcttttagtcgtataaactaattagtttttattttatttattaataggattttaaattttaaattttaaataataaataatattatattaaaaagatattaattataaacgggtattactatatactaaaaaggggaatgtgaaatgcaaaattcataaaataatcataattagtcaacttcttcaactgaaggaccagaaggagcatcaccagcagaacctgcacctggagcaccagcacctggaacaccaccaggagcaccacctgctgcatataatttttgcataattggatttgcatcttgttcgatttcctttaatctatcttcaaattcttcagttgttgcagtttgattagcatctaaccattcaataacttcattacattttgataataatttttctttatcttctgcaccaactttttcttcaaattgtgcttcatttgcagaattctttaatgaataagcatatgattctaattgattcttagcagcaattctcttagcttccttttcatcttcatccttgaatttttcagcttcagcaaccattctttcaatatcttcttgtgataatctacccttatcattagtaatagtaatcttttgagtcttaccagtacctttttctaatgctgaaacatttaagataccattagcatcaatatcaaaagtaacttcaatttgtggaacacctcttggagctggtggaatacctgataattcgaatttacctaaaatattgttatcctttgtctttgctctttcaccttcgaaaacttgaattaagacacctggttgattatctgcataagttgagaaagtttctgattttttacatggaatagttgaatttcttggaattaatttagtcataacaccacctgcagtttcaatacctaaagataatggagtaacatctaataataataaatcttgagtctttgatgattgatcaccagttaagatagcagcttgaacagcagcaccataagcaacagcttcatcaggattaattgacttatttggttctttaccattgaaataatcagaaactaatttttgaacttttggaattctagttgaaccaccaacaaggacaatttcttcaattgatgatttatctaatttagcatcttttaaaactttttcaacaggatctaaagttgatctgaataaatcagcacataattcttcaaatcttgctctagtaattgaactatagaaatcattaccttcaaataatgaatcaatttcaatagttgtttgagctgatgaagataaaggttctctttgctctttcacatgcagttcttaatcttcttaaagctctttgattaccagttaaatcttttttaaattttctcttaaattcatttgcaaaatgattaactaatctattatcgaaatcttcaccacctaaatgagtatcaccagcagttgctttaacttcgaaaataccttcatcaattgataataaagagacatcgaaagtaccaccacctaaatcaaagattaagatattatgttcacctttaccagaatcttttttatctaaaccataagcaattgcagcagcagttggttcattaataattcttaaaacatttaaaccagcaattgcaccagcatctttagttgcttgtctttgagaatcattaaaataagcaggaacagtaacaactgcatcattaactttagtaccaagataaccttcagcagtttccttcattttagataaaaccattgaagaaatttcttcaggagtgaaaactttagtttcacccttatattcaacttgaattttaggtttaccagattcatcaataatcttaaatgggaaatgtttcatatcagtttgaacttctggatctgcaaattttctaccaataagtctctttgcatcaaagacagtattagcaggattcattgcagcttgatttttagcagcttcaccaattaatctttcagtatcagtgaaagcaacgaaagatggagtagttctattaccttgatcatttgcaataatttcaactctatcatttgcgaaatgagcaacacatgaataagttgtacctaaatcaataccgacagcttttgacatatttttatttttatttttttaaactaataaattaactatttgtttgatgtagaaagaagaaaagttaaaagaataaatagaaataggaataaagaggaaggaattgaaattttgaaataaagcagaaacagtgttcttttataatgatatttgccacaagagagggattgacaattataccataaataattcatattccatcataccataatagatgaaaatgccaactccgaaacaaccgggagtttctcgaaacttccatctcactcactctgatgtaatcaatatgaaataatgggggatttttcacttactatgggaaaattcgagaaccttctcttgcactgccgctttgtccaatcactgcgccactcaaatgtttgaatttcttcaactgcgccgcgtggctctcattatctaattgcaccgccgctttatgaatatcatcaggtgttaactgtgtattattagtgatattactactactactactatctttactctctttattgtttaatgccctttccacaatttcaccaatgaaaacctttacctataccaccaagtaatttagcaaaatcatttgatggttgaactgtattacttatttgtgttattaatttcttaattgatccactatttaaatttgatctacgaaatgtttcatatctactattttgtattgaatccatttcacctaataataattgtcttgattgattattattaagtgaaaatgcttcctcatatattgatgatgtggtactactattatcagattcatcattatcatcatcatctgaatcttcctctgaatctgaatcttcctctgaattatcatcatcatcatcctcattatcatcttcttcagaattgtcatctgaatcttcattagacgcttcttcattatcttcaccttcaccttctgatctatcttcatctgatccctgtcccagctactttttctccttctccctcttctttcatactgtcttctcttgttagtcaattcatcctctccatatactatacttctcttcatattactaaccattaatctatgtctatatcctatacttaacacccccgtaaacacactctgatgtaaacactctccagtattaaataaaaataatttttcacttaacactatacgcgcacaacatccgtttatgttgtccaggaaaattatatatctttttggaaaatatcgaaatttaccaaatttacaactttattatggatcctacacaaccttcctcttatttgaataatgaaaacttgcagaatttgtagaggtgaaggtacaccagaccaaccactttttcatccctgtaaatgtcgtggttcaatcaaatatattcatcaagattgtcttcaattttggcttgatcattcaaaaaaagatacttgtgatatttgtaatacaaaatttaattttaaagttatctatagtgatgattcaatttctaaaaaattatcattttggttattattgaaaaacttattctctcaatttatgcattggcaaaattatttaactaaaactttattattcggtttatgtgtcggattttatttaccagtttcaattgttgcaattgattcattttatgattttttagctggtatacaaaaatttaaatcaggtgtattagattcaatacttttcaataataaaatctccgatgatttatcatttactgaaaaattagttatattacaaagagatacaattccaaaaggtgtaacaattgcaattatctatggtgctattgttttagctattattttaattcaaaataatttagcaggtgatccgggtgttcaaaagattattaataaaagaataggtttagaaccaaacagacaaaaattgctcttaagtgcattaattgaaaagaaaaaacatttaattcttcgaagaaagagtgatattttttatcaattgagacttgaaaacgaattatatgataaatcagtaggaggaagatggattatcagcacaaaaaattgctaaattagatcttcagtctattcttgagctacaaaagttattagttgaaagaattaacaaattaaacccaaatcaatacgaaaaattgaaaagtatatgtactgaacatccagaaactttaaatgaaatcccatatgatgtttctaaacacgaaaggtcttttattgttattggagtagcttatttagatagaaagttcagattggaattcatgtgcaagccaccagctgaagaatcattaattgtcacagaggaagaatttaaacaatttttaaaagatatatcagatgcaacttcacatacagcaaatgatcccccaaatgatcccccaaatgtaccagaaccagaaccagaaccagcaccagcacctcctcctgctcgtggtttcaatcctattcataataatcctgatgttattgatgtagatgaacagcttagagatgatgctatagatagattattaaatgttataaatggtccacgtttcttagataatattaacgaacaagatgacagagatgaagaggaagatcaaagacctcatcttagagatgaagatcaaccaaattgggatcaattcagagctgatgtcgataacattgatgtcgataatattaatgatcctacagcccgtctagcagctcaatttcttgaagctgcaactggaccagccataccatttgcagaagcaatggcaatggcaaatgaagatgaagcagctgctgcacctgcacctgcacctgcacccgcacctgcacataatgctaatgctgatccctttgccaatgtcaatcgtgttaatgatgatatcgagttaccaccattgagacctcatgaacgtgaatttttcagaaatattgtcaatccagaaaacgttcgtcgtcaaccacgtccacaatttcgtcaacctcctcaagctgttcaagatcctccaatgccaattattgatgaagaacctgaacctttttggaatggtccattatcaattaaattgatcctaactgcaactgtacttgttaaatcagttactttatttgtcttattcttacttaaatgtttaccttatgcattgggtaaacaaacgatctacacattttacactatcttacattatttcttccctaatatgtcactcaaatcatcaaaatactttccaatctgattataaaccactgaatttatttgttgatttcatatggcgtaatattattgatacagttttatcaactatttcaaatgttacaaataaaactctttctgataatttaagtgaaaagatcagtattcaattattaggtattggaactgttgcattctcagtttattgtattatgaaatatttagaattaaaatcttcacagcttaaaccattatcaggtaattcaagatcattatacatcatcttattacaagtgaaaaatactttcaaggttttcacattaatgttcattgaatggtgtctattcccattaatttgtggtattttagttgaatttgcgttagttccaattttcaatgaagatttatacaattatcatcttgaaccaagattatttggattcctatcagtcattccaacttggttcttaggtactttcttcatgtatttctttgcttcatatgtttcaatgattagatcaaagattttaagaactggtgttctattctttattagaccttctgatgatccaaatattcaacttgttcatgatgcaattatgagaccttttggtttaaggttttcaagaattttattatctcttggtgtttatgcaatttacattctttgtgaattcattttagtctcttggtcaattagattattctcaccaattgcaattttacctttccattctaatttcagctatgaaaaattagcttatgttggattgatcatttgtgcagattttatgaagaaaccacttaatatttactggaaatatatttttgttaagtgttgttcattattgagactttcctcatttttactgaatgaagatcatgcaaatgaaagaggtaagattgtctacaaatcattttttgcaagattcaattcaaaatctccaaactataataatcctgttgcatattctgaaactaaggaatatttcagttcacatcccgatgaaacttgttgttttgtacctgatggtaattacgtaagagcaccagatgatgatcatgttgcacgtaattttgtcagaactttgtttgttgcagttacaaaatcagatcggttattagaggaaacgccaacattacctgatgatgaagaaaaaattaacccatatggtgatattgatccatttgatgttaatacttatacaattgtttacagaccacctcaatttaaaccaagattattcttattatttgcatgtttatggttagcctcaatggttttcacatttggtatttacttatcaaatattattattggtaagacaatttttaaaattacaacattagaatcagttttctcattaccttctgaatactataagattgatgtttacacgttatctttaactatgttgttattatcacaattgaattttctcattgatattgttcaaagacaaatgcaagcaactaacgattcacctgaagcatctaaattaatttcaatgaaaaagatcgtacgttcaatgtatttgaatattagaaatactgtaaccgaatttttcaatacatttgcaatgcgtgttattgttagacacactgcatataatttcacaattataatctacattggtcttgcaattcaaccagtttttaatccacatttaattgaacctattcgtattggtgctttgtctatgatcattttcacatttgtatctctgatcagctcattcctattttcgaatgctaaatcaatcaaaattttccgttatattacagtttttacaattgttttacgtttgattttcataacattctcaccagccccacagtttactaacttaaaaccagagtttattgaagaattacaaaaattaaacactgttgaagaaattattaacttgtcattgaaaaataaaataactccagatccattgattattcaatctgttggaaatactttgttaccaccatttctaagacctgctattaaattcttcatgttaaatgaatttacaggtgttgaagcatggatctatattacggtatggtttatagctgcagcgttcattgctgtatcatctgccattaaattatggtcaaaattcgttgaactaactaaacaaatttattttgataatatgaaagttttagttaatactgaaggtaatgacgatgatgatgacgagtaaagatgtttgtttttcattaaattatattataataaatctataaaatcgataataatatatattccacgtataatagttctgtataaagttaatcctcaattaatggatcataattatcatttgcaggatgaataataacatcatttaaatcatcagttttttcaatagtcaatccttcctcattagctatatgtaacatacaaataaagaaaaatgatgttgaaagttctgatttttcattaccctggtatttagtgtatgtatctttaacaatacttgataattttaactctttttcatgatctgccttggtcaaatcttcatgctcaacatgttgtttagtaacatcccataaattttgtttaagtaatctaatattaatacgtttagattttttattatattgaatactattcttataccacgcaggtttgcctacaaatggaactgtttcattctttatttcatttgttgatattttagcatcaaattcatatccacctggatcattatcaattccaaaatcatcaggtacattatcttctggtaaatcagttggtatttcatcttcattaggtttatccataacatcataaaggaaatctgcaacatcttcatcaatttcaggttcattatcatctctaatatgattgtttttactaccatctattttatcattatattttctagcccagaaatcacgatctgcaatgatttcacttttagatattgtatggtgtttactgaaaatatttcgaaatttacgtttcggttttaagtaatgatgtaactaatctttcagaattccaaactttcatatcaggtatagttgtctcctcaacacgaatctcttcagaattaataagtttaatatttttattgggtttcttaaataaaacttgagtgtcagtttcaggtgaatcgttcataaaatcaatcacatattcatttttattttgtttagctctttttttggcaagtgctttttcttcccttaattttgctgcttcagacccaccttcaagatcttcttcattatcaaaaatagctgtaggtgcagtattgttctgtttagcattaaaagcacgaattttccaatgagatttacttcttctatttgatattttatccaatgccgacatcatttccttttcacgtttttccatttcttccattgatataggatccactggtttaatattttcatcattatagttctcatttccatcatcaaacatcatttcatcattaggattcaatgaatatggtggcggagaattaccagtttgaatattttgtgatatatcataattagtattttcttctaaaataccatcatcattaccatcattaaatcaaaattatcaatattataatcataattaagatttgcaacttcttcatatctttcatttgctaatttatctcgttcttccatctttttagccatttctgtaagataagctttaccatattccatatctgtgatacataatttaatactttgaatttcacttagagatttttgttccactaagttcggatgcatcaaacttactcttatatgtatttatcaatggtaatacaactgcatcatcttcgaatttaattacatcatcattatcgtttgtatcaacattcattaggccatcatcatcatcttcttcttcctttttaacagtttcaatgtcatcttcactttcttcatctgactcatcattttcaagatccatataatttttacttgatatcactgtatcatcgacgaccacacgagaatctttcgatattcttaaagcatttaataataaagattttgcacctccctcatcaaagtctgaaagcattttacggaaaactggatcaatacttgaatgttcaagttgtttatcagtaattttaatcttatccattgtagttagtgagcttttattttcttttttattaattttcttcttctttgttggttcataatctccatcacccttattatcatcatcatcatcgtcttcatcatttcttaattttcttaaagtatcctttttagcatttaatgataataattgcagcaatgaattagtttcatcagcaaccgcgtcaactcttttagatataactttagtacaaccatctaatgttgtacttgccgtttgaaaattaattgatacaccatcatcacttctcagcatattcatatcataaaaatattcaataagatgaacattccaagtattaacattcgttattttattatttgttgccattttaagagaatctacaaaatcttctgtaccaaactgcccaccataatcatcgtcgtcatcatcatcctaaattgccatcccgacttccattaactccatcatctaataaactaggtctatcatcacctatactaacacttctcgtattgttgcggctcatacttttatttggaagtgatttctttttcccatttgcagggcttgagaaccttggtctctgtcttttcaaagtagttcccgtcatcaataatgtaatatagagcttggataccttatccccgttgtccaatacctctgtatctacctgatcaatcctttgttgttatagaaatacgtaatagcaataataatgaaataccaaaaattctcatcctccctgaaacgaaacgaaacaccatttttccatcaagtgcgaaatctaccactctttgttttcaatgtaattagggtattagtatggtggttgatcacttcaaatatgtgctgttcttcttctgttttgctttatttgtacctttacaatctatataaactaacaaggtatgtccgctgaagacgaatttgcatctgctgaaaatattaaggcaattttcacaagattacagaaaaaaccagccaataaacaatgttttgattgtaatgctaaaaatccaacttggacttcaatcccattcggtatattcgtttgtttacaatgtagtgcaaatcatagaaatatgggtgttcatatatcatttgttaaatcttcaactctggataccaaatggaccaataaacaattaagaaatatgaaatgtggtggtaatgataaatttaaagattatatcattaaaaatggtggttcttcaatgttaaatagggaaaagaaggaaatttatgattctcaagttggtcgtaattataaggaaaaattagaagaaagagcatcaaatgatttaaagagacatccaaatattattgaatgggatgaaggtgatattgaaacccctgatgaaagtgataatgcatcatcaggtaatgatgatttcttctctaaatgggataaaccaactaatactccttctccattaggctcaaggaccattaactaccattgaataatagctctacaagtttaaataaagttgaaagtaacaatagtaccactgttaaggcaaccccctgttagaagagttgttaataaaactactacttcaagtaaagttaatccattaactaaaaagagtattttaagttctaattccagaaagaataaagttgcaataaagaaagtttcagctgatgaagttgattttgatgaatttgaaaaagaagcaaagagagaggaacaagaagttaaaagtttaggttataatccaaatgaagattcaagtgtaaatactaaaactccaaatcttggtccaaagacacaaacttcaacacctgcatcaattttcaataaaccagcaacaactgaaaaatcaaattctatattaggatcatctaaaaataatgaaactaagaaaaatgaagttgaaagtacgagacaaacttttgcaaaattaggttttggtatgactgctaataatgcagctgaaattaatgcacaaaataattcacaatcaaagaaatataaagaagtagaatacaagggtgaagttgcagctagatttggtaatcaaaagggtatatcctcagatcaattttatggtactggtaattatgatgaagctaaagcagcagaagctagaagtaaattacaatcattctccaattcacaatcctatttcatcatctgattattatggtgaagatgatgtttcacaattcagaaataataataataacggtggtgatattgaacaacaagttttacaatttgctgaaaaatatatgggtgatgatcttactgttcttaaagatgcattcgaacaaggtgcagagaaattaggtggttatcttcgtgatgtactcagaaactaaacctcttattctaagttgactatttaaattcccctgtataattcttattttataagacaatttttattagctatattgattgtaatgtagagtatatatcgatgatatgagtatcaaatttaatattaatagtagagacaataggcctaattaaagattgaaaaatcatgctatattcttttatacttaggatgcggttattattattatatttttcaagcgtttcttagtctaattaagtgacacattttcttttcttttgattgaacaaatactaacaaaacaagaatgtctgaaacagtagcagtcataggtgctggattagttgggtcattaatgaccttaggtcttgcacatagaggatataatgtaacattaattgatatgagaccagatccacgtaaaactagtaataaaagtgaaaagaatttaagatcaattaatttagcagttagtgatagaggtattagagcattagaatttgttgataaagaaatgagtgaacgtgtattaaaggatattataccaatgcatggtcgtatgattcatacattagatggtaaacaagaaagtcaaatttatggattattcggtgaacatattaattcaattgatagaggcaaacttaatgaaaatttacttagatgaaattgatttatttaatgaaaatagtgaaaacttaaataaaattcaatgtattttcaatcataaagttgcaggattatcatttaatacaagttttgctaacattaagttaattaatggtgataataaagataatgataatgagattgaaaaaaacttcgatttcataattggtgcagatggatcatattctaatataagatatcaaatacaaaaatatatacgtatgaattatcaacaagaatatattgataaatgttatttagaattatacattccaccaggagagaatggttcatttttaattgatccaaatcatttacatatttggccacgtaaagaatttatgttaattgcattagctaatgaagatggatcatttacatcaacattttttggaccatggaaattaactgaatcactgaataagagagaattaattgaaccattttttaatgataatttcccagatgcagttaaattaattggtatggataatattgttaaagtatttaaggaaaatcctaaaggtgcattaatgcaagttacatgtaataaatataattattcagataaggcaataattattggagatgcatcacattcaatggttccattttatggacaaggtatgaattgtggatttgaagatgtacgtgttttacttgaattattagataaatccactacaagagaggttgcatttgattcatatactgagaatagacatgaggatcttaaggcaattttaaaattagcaattgataattataatgaaatgtcaactaaagttatatcatcagcatatttattccgtaagacattagattcattattaggtaaattgttaccaaaatattggattccattatatacaatggtttcatttagaggtgatataccatatagtgaatgtattcgtcgtgaaaagagacaacaaactattttaaaaattgttgaaactagtttaattggaatgtgtgcaattgcaggatggtggaaataccgtaagtcaacatgaactgtgtgtttataataatgtgtatttaatgaaacgattatactgtaatattagaatcacccggtatcggaagtgctaattgttaagcaaatgtaaacatgacttcaaaatataggatgaattgtaaacataacaacatccaaacaaagtcagtcatcgtaatatcacagcctcctttcttcatagcaagacaagataagagtaataataacaattccttaaagaaacggtagttaaaacagtagttaacacagtagttaaaataagaaataagtgaaaaactccgacggtgaaaaaattaaatgttgccggtttcctaatcgggcaatacacccaccggccctgtaacggaattatttaaaattttccaatagtgagtaattgaaattcagtcattggacattcattaccctggggccttatgtagaagtggttcaactttctattttatttgaattaatatttgtatttaaacttgtctattttctcttatttctgataatagagaattgatatcatttttgatcttactatcaatcaaagtcaattaatttaaaatgtcaacactttacgataaagttttcaaggaccatgttgtccatactgatgaatcaggttcatgtttaatttatattgatagacatttagttcatgaagttacatctcctcaagcttttgaaggtttaaaaaatgctaatagacaagttagaagaccagattgtacattagttacagttgatcataatattccaacaattacaagaaaaaattttaaatcagtttcaacttttattgatcaagaagattcaagacttcaagttgaaacccttgaacaaaatgttaaagattttaatttagcttattttggtatgacagatgatagacaaggtattgttcacgttgttggtccagaacaaggttttacacttcctggtacaactgttgtctgtggtgattctcatacttcaactcatggtgctttcggtgctttagctttcggtattggtacttctgaagttgaacatgtcttagcaactcaaactttaattcaagcaaaatctaaaaatatgcttattagaatagatggtgatttaaatccaggtattacttctaaagatttagtcttacatgtgattggtgtaattggtactgctggtggtaccggttgtgttattgaatttgctggtaaggcaatcagagatttaagtatggaagctagaatgtctatctgtaatatggctattgaagcaggtgctagagctggtatgattgcaccagatcaaactacttttgattatttaaagggtagaccattatgtccaactggtgatgaatgggaaaaagctgttaaatattggtcaactttatattctgatgaaaatgcagtatttgataaaactgttataattgattcaaatgatattgtaccaacaattacttggggtaattctcctcaagatgctttaccaattactgctaaagttccagatccaaatgattttgaagatccaattgctaaaagtggtgttgaagctgctttagattatatgggtttaaaggctaatactccattacaagaaatcccaattgataaagttttcattggttcatgtactaattcacgtattgaagatttgagagaagctgctaaagttgtttatggtcataaaattgctgataatattaaattagcattagttgttccaggttcaggtttagttaaaaaacaagcagaaagtgaaggtttagataaaatttttgaaaatgcaggttttgaatggagagaagctggttgttcaatgtgtttaggtatgaacccagatattttagatcctcatgaaagatgtgcttcaacttctaacagaaatttccgtggtagacaaggtgcattatcaagaactcatttaatgtctccagctatggctgctgctgctggtattgttggtcattttactgatattagaaatttcccatataaggaaaataaggatgcaccaaagattcaattaggtactgaagaagaagataaaaaattacaagatgctgtctatgaacatgaaaagactaaatacccagaaggtgaaactgaagctgaaaaagttaaagatgaaattttagatatcccaccaaaatcaaataaatcaattgattcaaaatcaattggtatggaaaaattcactgttttaacatcagttgcagctccaatggaaaaggcaaatattgatactgatgcaattattccaaaacaattcttgaaaaactattaaaagaactggtttaagtaaaggtttattctatgaagctagatttgcaaaagattcaaatggtaatgatgttccaactgatttcgttcttaatgttgcaccattcaataaggcaaatataatttgttgtagtggtgataattttggttgtggttcatcaagagaacatgcaccatgggcattaaaagattttggtattaaatcaattattgcaccttcatttggtgatattttctataataactcattcaaaaatggtttattaccaattagagtcgatcaagaaattattaaagaaaaaattttaccacttgcttccgctggtaaggaaataacggttgatttagttgaacaaaaaattaaaggtccaaatggtgaaattttagttgatcatttcgatgttgaaccatttagaaaacattgtttaattaatggtctggatgatattggaattactttaactaaatctgaatacattgataaatttgaaaagaacagaaaggatgttttctcatttattgaaaatggtagtgcaaagatcattccagttaaaggtaccaaaaaatcaccatatggtaatacctgctcaagagtggtaagttagtcaactccaattaatttatatctaatatctaaattattcatataaaacttctatatattattttaatgtacaaaactttttttaggaaactatttatgaataataatatcttcatagtcattttccatctctaatgttaatccttgttcatttgctaaatgaagtaaacaaataaaacagaaacttgtagatagatctttcttaatattttcgttgtatttagttgacattatttctacaactttagtaaatttcattgtatctttattttctaagtcattattattgtctaaaatattatcagaatttattaaagttttagttggggtattagtgttatttgattctgctccatctttattatccttttgattctcattttgtgtttcattatcttcattaaaatgtgatgcagatctctttttcttactgattgatatttcttctattgatgtccaaatgttttgtttaagtaatttgacatcaactcttttagatcttttagcataattgatcaaacctcctttattacttctttgtgtgatttgtgattgtgttctaaaatcagttggtgtatctgtgttatcattattatttagtagggcatcaaaaccttcaataccattaggatcaaaatcttcaaatacgggtaaatcgtcgttattaatatcatgtaagatactattttcatgagtagtattattagtagtgtttatctgtggattatcattcttataagtttcagcaaaatattccggaccagctggaatattttccttctctttttcttcataagttctcattctatttggtaataatacagaattcattgttaattgatttggttttaatgataaaaatgctaagagttttgcggaaaacttcaaatcaccatcaagaacatgtttacctgaattacgttccttttcacttaacatgatttgtgacagataatctgaagactcaaacaatggtatatcttcatctaaatcaaaatcttcatctttcatgtcaccatctgacataaaatcaattaatttatgtgtatcagtacgagctggcttatattttttagttttcgactttttcaaacttttagttgcatcactatcattttcatcaccatcatcatcaccatcatcattcgtactcaaagatttcatcaactttgcatttcttttcagtcttgtaattttccaataaacatccggtcgtgatccaatatcatcatatttattaatataatccatttcaacttcatctaatctattctgtgcaaatacatcatttggttttttattcaaaggtggtaagtttttacgtattcgtatggaattatcattatcatcttgttcatcaccgaaaacgttaccaagtgtaaaattatattgagaatcatcagaattttcaactccatccataaatagagaatattgagttcttttggaagtatttgatacattatcttgtattatatcatcattagtaatgtttgcataagcatcaaattcaaaatctggttgatcatgatcattaatatgttctaggaaaggattatcattcagaggaggtatttgagagtcagattgtaaatttgcattatattgaggattaagaaaataatgttgatttataatttcattttctaccattgtaacatcaacattttctaatttttgcattaatgaagaagcatctttcaaacctttcgatatgttatctaactcagccagggatggacagactttcaaactattatttgaaaaatcaaaatttgtaatttttgattttaaattttcaaagaggtcaccttgaagtacgttttcctcagataggttggtcaatccaacagttggtttatcctcatgtgcaatatcgaaaactactttactttcatttgatacacgtaaaatattatttaataaacttttagcaccaccttcgtcgaaatcagccaatgcatttttgaaaactggatcagtagttgcaagaaaaaaatcatctttcactttaatagaattgaaagaagatgctaaaaatttagattttttcacttttctagatctaggtcgaccttcatgatcaggatcatcagcaatatcttcctcattgtcatcttcttcatccccatctccatcttcattatcattatcatttctattatcagttgtactattagtattgttatttgcactaattgcattattaattgatttcttagactgaatatttaaagttgataataaagtacttgtatccttaacagctgaatcaactctatgagaataaattttcatacaaccatctaaagtagttgaagctttttgaaaatctacactattaccatcatttgattttaaaactgaaaaatcatggaaataatcaattaatgcaaaattccaagaattttcaatattaattttattatcagttgccattctaatccataattcaaaattttcatttgatacaggaccaatatcaacatctatatccatactggtatcttgaccagtaattgagatcattgttattgtattttgggatccagaaagattataaaaaacacgaaattaaactcaaaattaataataaaataattaaattaataataaaatataaacaattgcccaaaagggtaaacatcgaagaaatttaaaatttgtgattcatgtgtaaacaagtttttgttatgcatcatctgaaaaacgaaaagcttaaatttccgaaaataaaagataaataccatgaaaattccgaaattcttaacattattacgtaatcaaagaaaaaaaggggaattatgttaaaaaacgtatcaattaccgcattcggtaaatgaatattagatggcggctcatcacttttaaaagcagtctttaagaaaatctgaaaattatttttgccaccattaataacaaagggatacatcaatgagatttgaagttatagcagttttaaggctcagtgataaagattgttttatatccctttttctattttatcatcatctttcttttatttactttcatttcttacgggtactggtataactacaatatggactaggaaaaggacaagaaatagtcaaatttttacttgattggcattatttattaactgaaccaccagttgacggttctatacctgaaatttatttttgttttgtttgttcagtttatagtaagggtaaggataaagtttcttggttacaatttatgaaatatatgcgtatgattgataaattatgtaatggtaatacacttgtttgtacacctcagaatgctttacaacaacattatgatgatccattttcgtgttttgataaaattacttatattaatagattatcacttgccttattattaagaacttctcaatcaatggcatttacaaatactaattcaaataataataaatctttaaataataataataataataataataataaattacctgatttaatccaagcagatgatgaggaatcgaattaaatcttcaatttcagatgatttaccaacaactcctcgttcaaattcaatttctccatctccaccttcaagtgcaggttccggtgaaggctcaggtccaggctcagagagttatgaaattggtattcaattatgcaaatacagttattgaaattgatgattcaagttattaatgaaaattatgaaagaaaatcattagataaagttcaatataatgatatacccaaaaataaggaagataaattaaaatatgttttaaatttaattgaacctgagaaaccaaatatttcagataatgatatttatcctatcaaagttataacaaataaaaaattaattccaaaatcaattgatgatacttatacattaacaactaaatcaaatagattagaacaattagaatatttattagaaactccatgttcctctcatagtttacaaagagagaagagcaagacttacaacgaatatacaaccattttatgattgttgtgaagatgttgatcatgcttcattactttcatcattaacaacatttgataaaaatacaagttattgtaaaataaatgaagaaaaattgaaaaggttattaaataatgatagttcaaataataataataataataataatagtaaaataaatcaaagatttcaacaattaaataaatgcattgaaaataagttacattttataccaattattcaatcacaaactgactttaaacttaggtgattgttcatatttagatacatgtcataaaatgtcaacatgtagatatattcattatggacaattaatgccaacaatttataataataaattaaaacaatcaaatgatgaaaaattaaatgaagaagaggaagaagaattaagaattagtgaaacaattagaatttgggattatacgaaaaatgaaagtatttgtaattatcttaaatgtaatttaccaccacaatggattaattgtgatttaatgaaactggattttgatgttttaggtaatgattatggagttgtaattgcagatccaagttggacaattcatatgaatttaaattatagttcactgaaagatgatgaattattatcattacgtatggataaattacaaaatgaaggtattttccttttatgggttacaggtagaacaattgaaactggacgtgaatttttaaataaatggggttataaagtaatcaatcaaattacatggattaaaacaagtcaattaattagaactattagtacaggacgtacaggacattggcttaatcattcaaaggaacatttattagttggtattaaaggtaaaaataaattaaatgaagttaaatggattaatcgtagtattgatgcacaaattttaatttcatcaacaagggaaacttcacgtaaacctgatgaaatttatggaattgttgatagattgacaggaccaggtgttaaaaaattagaaatcttcggtagacaacataacacaagacctggttggttaactgttgggaatcaattagacggtacaaatttagttgaaacttcattgataaatcgttataataaatggttgaatagtaaaaatatttgagatggaaaagacgcgtcgtgattacctaatccatgttaaaaaaatttgaagaaaaataatttcagccaataagaattgtcacagtatgttaacagtcattacataatcaattcaagaatttgtggtgcgacactaaggaaggagagagtaagtttttctataacagagttaccataattataattaattaacattgctcataaagttttttgtagttcaattaaacaaggcattcatatataatgtttagaatcgttgcaaagaatcaaattaaaactattggtagaagatttcaatcaaatcttgataaaccagcatttgttgcagatccagcaaaaggtgcagaatttacaaaacatttaaatgatattgaacatcatgcaagtggttcatcatcaaattggaaaaaagtttcattctttttagcagctccaattattgcaattactggtattaatacatattttgttgaagctgaacatgcagaacatagagctcataataaacatttacctgatgaagaatggccagttccaaaatatccatatttaaatattagaagagttgatttcttctggggtgatggtgataaaactcttttctggaattctgattgtaacagacatgttaaataaattagttgataaaatttatttttaaaacaatcattttcaacttattatccatatcatttcaatattattactcatattattattattaatttatttttttaattattcttttataatgaattaaaaaacaaacttagtcgcagaaaaagacagaaaattattaaattattgtagttgatcgttaaattatatattgagaggaagaagaagaagaggaagtaattatatataattatttgttattattagtaaattatgtagtaaaataaagatttgataaatgatgaaattgatgatctgttaatgataacaaaaaaaaaatgcattgaagttttgtttaatatacaaatttaattcacaaattttaaagagttgaaaatatataaaggttattagttgcagcaattgcaacagaattttcatttggatgccaacttgaatgtaaaattgattttttaaaatctattgaatcaggatctaatttattaatcattgataaatttttacgtctatttgaatttgaatttaatttctttaatttaaatgcagatttatcagcttgtaataaaatttccttttcattttcaatttcagacttattacattcatttgttattgaattttgataaatcataaaattattattataagaacctgtcataattgattttgaatcaccactaaattgaacttcaaatttatcgaaaattgcatcattttcataagtatcacataatctttcccttaattgttcatgaatattaattgttttaattggtttattttccatattaatatcccaaattttaactgtcatataatctctacttgcaatatatctaccattatttgaaaatttaacatcagaaattgatgaagtaatttcagtgaaaaaattatgatttgatggatccatatattcttcaaaaattttacaatgattatcacataatgaattcattctcatatcatttaatttaataataccctttgatgatgaatacataaataaattacaatcatttggatgaaattcagaacttgttataacttcagttaattcttccatattagttggtttaatatcaacaatattaaaactttgatcttcaatatttaaattccataaattaattcttaaatcatcacttgatataaaagtttcttgatctgaatttatactaattgaatttatatgataagcatgagcatttgcgaaaattttctttggttgagcagctgttattgtatcatgatatgataatcttggtaatttaattttagccataaaatttgaattatttgaatttgaatttataattgttttaattaaatctggatttgtttgaaatgatgataattgattttgaatattaattgttgaaattggtgaattatttgttaattcattattattattattattattattacctgtattacttatattattattattttcagaaactaatttaatttgcttttcataaattttccataatttaattgttttatcattagttgataataaaaattttgattgattaaaccttttcaaccatttaattttatttatcttttcttcaatttctaaacttttcaaataatcaaattctgcatcatgactttgaaattctgtataaaatttatattcacaatttgattttgattcatttctttcgaaaagaacaactctaccacctctatcaccagttgctaaaaattcacctgtatgatcaaattcaacagttgaaattatatcagcttcagttatattttcaatatcacctttatcaccaaaacattgactaaatttccaattagcttcattattattagttgaatttgtattattaatattattattattattattattattattattactattattatctgtactatccattatattatatgattgtattgttattgtatattatatggatattatcaattgagtagtaaatattagttattagagttgttattattattattgttgttatgattgtattatatattctataagaagtatagttgaatattgattatgagatgtactgtttctaatcgaatcttatacctgtcattaaagactctgtactgctgcattggcatgtccattttgattttcattatttaaaatttaatggtcggaaaattgaccctgtgaaattgaagtggaatacgatgatgtaagatgaaatttccgagagtgttacgtaatgggatttaataaggttaagtataggtataagacatagaaaaaggttacttacttaaactattaataaatgtgtacaaaagtaatttataatataatataatataatttgatataatataatataatgtaagatatactaattaattaattaattgaaatgaaatgataaacatgataaaaacataattattttataaaacattcaattaaatttaaactctctttgcagcatcagttggagaaactttctttgcattttggttaaatcttggtctagcaggtggagatctaatttttctatcagttcttgatctaactctaacaattcttgaatgaattgcacatgagatacaataatgtaatttattgtacatttttggaattggatattcatcataaactgaagcttcagagatatctctaacagcagctgcttcaaccatatttctaacagtcattcttttaattgctttatcctttggaacacatcttgaacagttaacacatctaactggtttaacgtgacctctaccagacttatttctaccgtttgcagatctcttctttggcatgtttacttcttgatatgtcgaaaaaaaaagagtttttaagaattataataataataattatagtagaaataattcaacaataatagtaagtagtaagtatgtaggtaatattgaaaaatttcagtaatgatagaataagggtatattgattaacagaaaatgtctactgggggggccattggagggaccattggagggtagagcgaggggaatgggggaataggggaactgagttttttttctttctttggaaaattttagaggaaaaaaaagttgcgtccttttacagtcacaaatattattatcagaaaaataaaataataattagtagcccttgcgtgtatcacgtgagcatgaaaaataaaaagtgcaaaaccctgttgcgacgcggccgtcccgtctgttttgttttgcggtcgatgcgtctgtaggtttgtacaatattttctatagtaaattcactcaaccaataagaattgagatagatttttctactatttaaaatcacctgttttggattacgtaacctattattggtaagaggaaaatttaaaatagtagtaataataataatacagtagtggtacatgcaatatgttggtaattcatttattttgtttgaattatactacatttgcacctttaattaactatcaatccacagtaatgttaagacaatcatttaaatttgcaactaatgttgctaaatcttcaaatttaagaagtttttcaactactttatcaattaaaaattcaactccaaaagaatttaaaactgcaacaactttagctgatgttaaatcaaaatttgatcttattggtaaaggtgctcaagaaggtgaagttccaactgatttacaacaagcaactggtttagaaagatttgaattattaggtaaaatggaaggtattgaagttttcgaaactgaacctttagatgcttcaagaattggtacaatggcaaatcctgtacttattgattcttatgatgattatagatatgttggttgtactggttctccagctggttctcatgttgttatgtggttaaaaccaacaactgataaagttgcaagatgttgggaatgtggttcagtttataaattaaattatttaggtactggtgaatctcatcattaaattatattatattaattataattataattataatataatataatattcaaccttttattattcaactttaacaaattacaattacttatattactaccattattatttatattatattccttataaatattttataaaattataaatttcgacttttattcattatctataatttttcaccattttcatttaagatttaattgatcttccttttattgtatcaaatcaatccccacacatacccatatatatacccataatgaaaccttctatccttgctctattcccaattcaacctacaattaacaattataatcaccttttggaaaattttgatataatctactatacattaacaacaagggaaaatttcataaatgatattaaatctgataaattaaataaaattcaagcaattttcggttcttatccaggttttaaatcaattggtggtttgaatgatattgaaattattaattcattaccaaattctttgaaaattatttcattatcaagtgcaggttatgatggttatgatttacaattattaaaagataaaaatattaaattaactaatgttcctgttgatgattatgttgcaatggatgttgcagattgtgctctttggcatgtattatcaggtataagaaaattcaattcttttgataattatataaaatctaatacaaatgatgcaaatactttaattgttagagatcaaattagaaatgttaatatcattaatgataatgaaaaacataaaggttttgcttttggtcatgtttatcataataattcaataactagatgttcaaataaaaaatgtgttatatttggttatggtttaattggtaaattggtatctcaaagaatgaaaactattggtatggatgttaatatcgttgttagagataaatcaaaatatgtttcccatagtgataataatgataataataaactttactcttcaaattctaaaactgaattaaccaatgcagtatcaaatgctaatgttatcatcatttgcttaccaggtggtagtcatactgaaaatatcatcaataaagaaatcttccaattgatcaatgataactcaataattgttaatattggtcgtggttcatgtataaatactgaagatctgaaggatgcaataaattcaaagaaaatctctcatattggtctggatgttttccctaatgaaccaattattgaaaattactggtttaatgatcaatcaatcaatcaaacttcaaataatttctatacttcttcaataactcctcatttaggtagtgcaactttagaaacttttgaatttgcaactgaaacttcaatttctgatattattaacgttattgaaaatgatacctttaatcatgtcgtcaatccataatatcatatcagcacactcatttaaccattgaaatttccttttccatgctaatcattatatttttataatctgtataaattaatttccatgaatcaatactatccttacatgtcttaattgaaaattttctctccttctctaattgtatcatattaccactctttaaattatcaaaattttcattaatatcattaatacattcatttaaactttgttcacttattttttcaaatatccaatcacttgaattttcatcattttcaatttcattttcattattaatttcaaacatttgccatggtttacctaatggccaatcactccaatgaatataatatgcatcattcattatttttttaccctcccatccaaatctatcaactcccataccaacttcaatttcatcattatgatcatcattgttattattcttatcattactaaatttaagaaaatcaaataaatttttattactaccatcataattaaatctccatgaccaatcccaatatccaatatttggataaatttccacaacatctccaatattcaaaaattcttcactttctttggaatttttaatcctttcattaattaatttattatttttattatttaaatatgaataatcaactggactagttaaataacttgaatgttcatctaatttatgtctgaattctcttgataataatccatatggataatgtggtataatcattaatgatggtaatatcttttcatttaaccattcattttcaatcggttcttttttatcattaatgaaataattattatttagtaatgtatatggatcccaaattttattgataatttccatatcatattcttcttcaccttttttatcaattatagttaaaatccattcaaatactttctcatttggcattataaccataaaataacttgataaatcaatattttttataattgataatgtaagttccattgatggtaaattattataaaatttaaaaaaatattcattattaaattctaattcattctcaataagttttttgtaaaaatcttgaattgataaactatattcaaacggtgttggtggtatctcatcaagtttattattatcgaaccaatttttcgattgtttataaagatccttttgtttaatataattaattggtaatgctaataatgatggtggtaatgtaaataattgatccatatgtttataaattattgaatctccatcaagataaataattctatctaaatgtgttaatgaaaatgcatataattttgtaaatgagtaagaccaatttgttgaatctttcaaaaatttagatctgataggtttaactaaattaattttaacaaaatatctttccttcaataatttaaccatatttgataatctcgggtttttttcctttgatatattttcaatattaaatgaacaaattaactcaatatttgctcgagttttaaatttccttaattgtttaatattgatcaaaatcggtaatagttgttcctcatcagtaacataaaaaacatatgctaatttatcccatttaatcttatcaggtgcctcaatttgcatagatttgtaattttgtattatattttcagctggtacatatttaatactctttgtgtcaaaatgagcttcactaatatcaacttttccattgttgttgttatcttgaatattgattatcgaatgtcgtttcttacctgtaagtgtaagtaaataccatatgaataaaattataactgtccatacaatagcacgtgtgtgtcttctagttatcattattcaacacacaaactctcaataccgtataataaatacagattcaatcattaactgatcactattcagatttgatccaaatggaaattcatgttgctaataaataaatacacgagccaccaattatttcaagcgacgtatagacgcatacatgtttttcccacattataacaaattatcaccaatattattaaagagtttacacactcggattagttatttaaaatgaataaataatgttagtttgaatataaaactaaaaataattaaatagtaacgaaagagaactataaattctaaatatataaatgatttaatcgaaatcgtattaaatcaaaacaaaaccaataaaaataattataaattgattgtaaatgaagtcaaattgaattaaatcaaatgacaaagaaaaaacctaaaataatcataacaaaactaccaaaagatacattcttaaaagatgccataccttcataaattgaaacgctagtcgccggacctgccgcggtagttgaagttacaaatgaagcttcaggggtattgtaaacataattgccatctgttgttgttgttggacttgctggatatgctggattagtagttggattagtagctggattaatagttggattagtagcgggattagtagctgggttggtagttggattagtagttggattagtagctggattagtagctggattagtagctggattagtagctggattagtagctggattggtagctgtttcaagtggtgggttgttaacttcggtattttcagcaggttgagtctctgctggaacttctggaacagttgtatgtttagcattacattcatcatctgaacatgatgtaattgtatcagtagtaaatgatgtagcagtttcagttgagcctgggatggttgtttcaggtggtggggaaactaacacggtagtttcagatctataacatctgttatctgagcaggaagtaattgttgcaagtgtgtatgctgtgtcagtaatagtatacttagcaggttcacttgtagtttcagctgggaaaagagatgatgacgttattggtaatgaagatgatgaggatagtaaacacgatgatgcaggttcttcaacgacaactaatgttgcattaacgtacatattttcataattggttgttgcaataaatgtagtgtatgtagttgattcacaatcaaatgcagtttcggtagtgtagaaaatattacatgaagctggtggagttgcaatttcaacttcttcaaaaacaattgtactaccagtagtaatagttgtagtagatgttgttgtaacaatttgacaaatagaattatcaaaaactatagttgaagtggtggtacttaatggtgtggtagttaaataacttgatgagaaacatgattcaggtggaacataaacaataacttcgtcataagatgtaacatcaaaagcatcaatactagttatgtaactagcagtggatgtagtaagctcacaataactattagttgaagtaatggttatggtttctggtgatgtaaatggtgaagaagtggaagtaaaagatgttggggatgatgaggatgataaggatgatgataatgatgaggatgatgataatgatgataatgatgataatgatgatgataaggatgataatgatgaggatgatgaggatggtaaggatgatgaggatgatgaggatgatgaggatgatgaggatggtgataatgaggataatgaggataagatgaaagtaggagctaatgaggatgaggatgatgaggatgatgaggatggtgataatgaggataatgaggataagatgaaagtaggagctaatgaggatgaggatgatgaggatgatgaggatgatgatgatgaggataatgatgaggataatgatgaggataatgatgaggataatgatgaggatggtgataatgatgataagtgagatgacgatggggaggatgttggggaatgtgaggatgataatgaggttaagatgttagtaggtgctaatgatgataagtgagatgacgatggggaggatgaggatgatgataatgatgataagatgaaagtaggagctaatgatgataagcgtgatgagggtagggaggatgatgataatgaggatggtgttctaatagtgctactaaaggtggtgagtctattggatgcatctctagaagtacttgtacaagttgtaggtgtttctaaaacaataatatcaacaaaagtagttgttacagcatcagaaccaatagtggttatagtagttgtagtagttgttacttcagttgcacaagatgaattgactgatgtaattagatatgtacttggatatgttgtaccttggtaaacaatagcatgagttgaggtaacggggtatctgtttgaatctaagacagttgttggtaaaatattctgttgtattgtaagtacccgtccatgttgtatagtctgtttcaacttgaggtcttttaacaataacataagttgaagtaccaatagctgatagagaattagatattgttatgtcagttgtaattgtactaaaactacttgaatcccagaaatataatgaagttgaataaaatggaacataatattcatagttgaacccagcaacggtaccatctctgtaaactgtacttgttgaaattgaagtagttgaaccagtccattgagaaatttcaatttggggagatggataaatttttatttcttcccaatatgtggtacctgatcctgtaactcttgaataagttgtggtaccaaaaactttattgctccaaaatgatgtagtttcagtgataggaccccaaacttggacaataggtgagttagcagttgtaatagttgttgttgattcaaaagttgctgaatgaaaattagtgtcatacattggacgataaatggtgttaatccaataaccagtaccattaccttcagagtctgtacccaatgacactctattcatataagtcacactatatgtattatcccaaaataaagttgtagtacttctactgaaatcaattaattctcttataacagttgtgcttggatgaccttgtgcgtcaactgtagtaatggtagaataagaagtagcttgagttaatctattccatgtacttgttgtctctgacatatacttattttctctaacaacccaaacagatgtagtacctgaagcaattctaactgtagtagttgaaggagtataatttacaggatatgcatatacggttgttaatggaggaccataaacataaataacactggtagttgtatgagcatctgtgctagtaagtgtggatgttgaataggttgtataagttgttggaacatatatagttgaaggaggtggaagatgaatataaattacagctgatgattgtgttccaccaatcatggtataaccggtataggtatattcttgggtaacatcataatatgtaactgtagttggaacaggtaaatattcataaataatctcaccaatttctgtcacaccatttgatgaaatttgacctgttactgtggtataagatgttgttgtagcagcttccagttccaaaaagtgttgttgatgaagttaaaagattttgtggataacggacttcttcaacaacataagttgagccatcagaaactgttacatattcagctgtaacagtgctttggccggaaatgatataagatgtagaagttgaaaaaacacttgatacaatagttgaagaacattgagcattggctgcaggtgatacctgataaatatagttacccgcatcgactgaatcactttcaccaggtaaagtaacttgaatatccattccaccagcactaattgaattcaaataaactaatcttattggataaaatgaaccaccttccaaataaacccaagatctaacttgtgaaccagtaggactattaatttcttttgttgaccaaataaaatcagattcactttctgttgttggaatactaccaggtgtacaacacgtataagcagaagaaccaataaacatcatagcaccatcatcaacattaagtacactaaattcataaataccagtaggtaggagctataataaaataattagttaaataattatgttagtaaccattcataataaaatgaaataaaaataacattgataacatacgataaaaataacccgttgattctaaaacaaaacgatttgagtctaatggaacaccactaaaagttgtatatgaaccatctaaactaaaactaaaagttgtcatatcttcgactgtaccaataatctgaccagttctaaaattagattgataaaaatttgcatcggtaattgaaagtgtattgtcttcagtatatgtataaacagtacctgcaattcctcttgaagatgcgagattatcccagttacatgcatcaattgaatcaacaaaattagagtcagatgtatctgcaaatactgatgtcaaaaatgttgtgaaaagtatcaatgatgataacgttgaatgtagaaccatctttgataatttaatatattttgtatctatagttaatttgtaatataacttttgtttgacaaataaatttaataatattaaaaaacaaataagtaatgatagaaaaaagttctatgactgaaaagttcccaacccagatatttatacaaaaacatattggcaatttatactgaaataaaatgacctaaattaggaaaacttatgggagtgaatgtaaagccaaaatcttgagatctttgaaaattgaaataaactgatatatcagattatcagatcaaaatttggaattacttaatctaagcaaacataaacaatagaattaagatataagaagaagccttgttacagggacactgaaaaatcttatcttctacattattctaacgaaagtttatttgcataaatctaactttccaaattgagccattaaaaataatgttatcatagtcataataagtgcataagtataattcgtatcacataaaatttgaaattaccatatatagtttagcttagtgaaaaagcaatagaacaattgaaaattagtgaaaaaaactatagcaagaaaaaaagaaactcaagaaaatttcatgatctcgaatacatgcattttgttgatcggacataaacaaactaaaaaataaggtttgggcactgaaacaattaattaattaggggtgggacgatttaagaattatttttcattttactaattattcccatttcataatttctattgtctttgatagtagtttattgctttttattctttttaattgttttaatttttatcttgatacgttaacaattaaaattatatagtatttagctcgtatataataattcttagtctttgtggaaaattaatgcagagatcattaggtgaaatgacagtcccaagtacataattactactaaagagctatactaagggataggatgagtactatttcaaactaatctgataggttatattacaggctgagccactataatgagaaatgagatttttggaggaatttttcttgtgttattgaagacaaagattttttaatattgaaatcaattatacatgaattattacattactatatattttatacttagttattttatattgaaaaacttttagtttagtgtgaatacacgctataaaagaaattacataattcatgtttatcggccgactctacttttagcaaaattattacattttaaacaaggccccataccaaaatttatttaatatacacacactacaaagattcctaaattatatatgaggtgtaatatcatacatataactaataatccgtttcgtaaaatgtaaatagaactttcactaactgagatgtaattataattcaattactcaattactcgatttgtaaacagggatctacaaaatagtctttttacacaatgtttgggctctctgatactaagatttacatctcggcttaattaatttatttatctgtaattattgtaccactaatttcatttcatttatttcattttcatttcattttcaattagataatatttatattactaattacaaccttatattacttatttctttcaaatgacgtcaatgtgacaaagaatactggtaaaggtatatatgatgaagatagcaagggtttctttcttttgtgcaaaatccgacaggaatgttagaataagagttacttacggatattgattagtgataatgtatgttatataaaaacatgtataattaattagatacggggagttatgtaccatgggctaaccactagacactcgatgaccaatgccacaatagtaggatatagggctcgctggtggtattatcatgggtgatgggttcatattatctacctcgggtacctttacttagtctaaataaccctaatctagactatcggcctctgatgttaccctattgggtatatggtccgaagtttaggtataatgtaataattctagcagtgatctcatcgataacgataacagttgaaatttttttgttaaaaatttacgagataaagaaacgattatcattgcggggatcaccaaaatctgtgaaaaacttctataatctataaattccttctttgattgtcttaaccagtccccgtgatatttcttacacgtttagttggtccctaaaagttccattctaaaccttatttaatgaactagtgtcatttttcttaattaaatcatcaatttgacatactgttgtagatattgctgctaattccccgcaaaattatcgttaacatatatatatatatatatatacagattataaaaatataatgattagcatggaaaaggaaatttcaatggttaaatgagtgtacttatatgatattatggattaacgacatgattataggtatcattttcaataacgttaataatatcagaaattgaagtttcagttgcaaattcaaaagtttctaaagttgcactacctaaatgaggagttattgaagaagtatagaaattatttgaagctttattaattatttgatcattaaaccagtaattttcaataattggttcatttgggaaaacatcgagaccgacatgagagattttctttgaatttattgcatcctttagatctttagtatttatacatgaaccacgaccaatattaacaattattgagttatcattgatcaattggaagatttctttattgatgatattttcagtatgactaccacctggtaagcaaatgatgataacattagcatttgatactgcattggttaattcagttttagaatttgaagagtaaagtttattattatcattattatcactatgggaaacatattttgatttatctctaacaacgatattaacatccataccaatagttttcattctttgagataccaatttaccgattaaaccataaccaaatataacacattttttatttgaacatctagttattgaattgttatgataaatatgactgaaagcaaaatcttcatgtttttcattatcattaatgatattaacatttctaatttgatctctaacaattaaagtatttgcatcatttgtattagattttatataattatcaaaagaattgaattttcttatacctgataatacatgccaaagagcacaatctgcaacatccattgaaacataatcatcaacaggaacattcgttaatttaatatttttatcttttaataattgtaaatcataaccatcataacctgcacttgataatgaaataatttttaaagaatttggtaatgaattaataatttcaacatcatttaaaccaccaattggttgaaaacctggataagaaccgaaaattgcttgaattttatttaatttatcagatttaatatcatttatgaaattttcccttgttgttaaggtatagtagattatatcaaaattttccaaaagatgattataattgctaattgtaggttgaattgggaatagaacaaggatagaaggtttcattatgagtatgtatggttatgtatgggattgatttgatacagtaaaaggaaaatcaaatcttatattaaaatggtgaaaaatagataaattgtaacttttcaagtattgggatttttatataacattatatagcttaaattgttgaaaaacatatacattataagtaggcattatcattacagtaaagtttccaccattgacgaaagcaagaaagaggtgagccgacacactctcgggaagacttaatcaaattccatgtaacgctgtgcttactcaaccaccaaatgaaaaaatataaagcgcttgaaaatattttttacatggcattacaaaaactatcaagttttaaccgcttgttatatattataatatagagaagacctattaaaaataggtggttgttattgtagacaataatgataaggttaaccttaaatgttggataatattaatgattaagagaatgttatattgtgatagatttaatgccgctaatataatccgattgtaatcttactttaccgtaccttaccttactttaccttattttaccttactttgccttactttaccgtgccttaccttactttaccttaccgtgccttaccttactttaccttaccgtgccttaccttactttaccttaccctattttactttaccttaccctattttactttaccttaccctattttactttaccttcccttaccttaccttatcctatcttatcctatcttatcttatcttatcttataattgaccaaatttaataataaaaatcaaaaaatagaatcaacttattgctatatacaatattattgttataactattatttaaatagctaatttcccacattattgtataatagcatgaactaataataaaattagtgcatcttaaacaagtaaaaaacttccttttaaatcaagtcaacaatgtttaaaagttttgataatagaaaaggtgaaaaaggtggtgatgttaatagtaaaattgaagaatcaactttgggtttaaaggatattgaaccacttgattcaaatcgttcaattttagttgatcaaaatggacaaaatactgatgaacaagttttaaagagagattttaaagcaagacaagttagtatgatggcagttgcaagtgctttaggtactggtttgattattgggtctggtactgctttaaagagaggtggtccagcttcattatttattggttatacattcacaggttctcttcttatggttgttttattttccttaggtgaaattgctgctttctgccctatggataaagcattctctggttattgtacaagattctcagataaagcattaggttttgcagctggttggaattattttttcacttatgctattactttacctgctgaattaagtgctcttggtatgattattcaattttggagaaaagatttaaatccaggtatctttattactgttttctatgttgttattatatttgctaattggtttaatgttcgagtttatggtgaaattgaattttggacatctgttgttaaattattaactcttgctatttgttttattacaagtattgttattaccgctggtggtggaccaaatcatacaactgttggtttccaatactggcataaagatgcatttgttgaatatttattagaaggtaataaaggtagatttttaggttggtgggcatgtgttattcaatctgtgtttgcatatactggttgtgaatgtattggtatcatttttggtgaagctccagatccacgtactgttgtcccatctgctactagacaagtttttgttagagtttgtggtgtttatattttaggtgtcttccttattggtttagttgtttctccatttaatcctaatttgggtactgcttcaaacgcagctgctgcaccttttgtcattgcatttgaaactgcttcaattaaagttttaccatcatttgttaatgcatgtcttttattctttgtcggcggtgctgctaactctgatgtttaccttggatctcgttcattatatggtcttgctagagatggtatggctccaaatattttcttaaagttaaatagaaatggtaacccatactatgcatcattatttactgcattatttggtttattagcatatatgaattgtagagattcatcagcaactatttttggttacttctccagtgcagtttcagtttttggtttattaacatggattaatgttttaattgcttatattacctattatgatgctacagttttccaaaaagttccaagagaagatattccatttagaatttggttccaaccatatccagcgtatgttacaatttttttcctctgtattattacattcttcaatggttacaatgcatttattccaactttccaatataaacaatttatcacatcatatattggtgtttttgtctatgttattatgatttttggttataaattatattacaagactgaaagagttacaaaggaaactgctaaattatacaactacgttgaaaatgttgttagtattgatgaagcattagactctaatgaaaaagtctaattttataacttaaaattgtttattttgattttgaattattatagttgtgtatataggtgctaatatttaaataataaccttagaagcacgtttttttgattttttttaacaaacgaagtttagttttatatacctgattacatataatattatctactatttgcaaatttgttacttatattataagtagtgtaataaagttgtaaacttctacctaatatctacctctaggaccaaacaatacttcgtctatataagaactataaatactataactaactaaactataatgtaactaataacctaatgttgtactctaacttcataggattacgtaagtacatattgaggactatattacaagtagggatatacttggttcctttattgttaaatcttttgtaaaataattatgtaatacttgaatgataggtcgatgagactgtgctacccccgcaaaatggagtaacttttcaatatatccggagataaataacaattgtatcggtaacccaacaggtgatgaaaatttattcagtttttatcacaaatttactcgatggccttattatgttggattagtttcatgttgaaataatttaaatcaccttgtggggtcagcataaacgttttttttattgattattaatattttgttcattagtataaatacttgaatctatccctcccaacgtgatgatattatcataaactgttatgttatctcatcttattaatacgcacatattaacatactcacatactcataatgaaggaaataacatatattttaagaccaacggaatctaataatatacaaaataagagaagaagttcaagctcttcatttaataacaattctaattctaattctaattttttaaagaaacaaagttttaatgattatttaatatcgaatgatcaatcaaagccaagatcatttagtttaaattatatttcacaagctcaaattgaacgtatgaaatattattcatgatgtatcaccaattctaattttatacccattaataaaaaaagttcattatttgatataattgaactttattcagttctttttcattttatcattatcattatcattatccccaattttttttacaaatctatataaattgtgcaaatatattaattgaataaaattttttaattattgatttttttttatacaaagaataaatataattaatttaataataataatgatataataataataataagagtttattgatctgatgattataaatcacttctagtaatctttgaaacatctaaacattcatcttgaattaaagtttttggaccagaataaggttcacaagattctctctttgttgtaccagcttttaaaggtttgccatttttaaaactatctaaaatttttaaaatttcttctttatcatgtaaatcttcataaaaatcatcatttatttgaaacattggagcatttgcacaagcacctaaacattcaacttcctctaatgagaataaaccatcatttgaaatttgaccaggttttaaatttaaattatccataattgtttccataacttgatcagaattacataattgacaaggagttgttgtacaaacttgaatatgatatttaccaacaggttttctttgatacattgtataaaaagttgcaacttcataaactctcattggtggcatatttaattttttagcaacataattcattgcagatattgaagtaaaaccaatttgtctttgagctaaatctaataatggcatacaagcacctttcttatattgaggtggatatttctgaattataatttcagcctttttagcattctcttcagtaaattcaaatggaatttcaggattattttctgcagtatctctatgaactgaaattatactactatttctaataaatgatttaaatttaaattgattttttatattatttctaatattatttcttatagtattttgaaacattgaaattaattgtgaatatgttgtgttatgaatatatttaatgcttgatctattagataattatataaaaactgttattgtataatcactttagttaatacaaattatttttcccctctcctataataaaccattataccctcacttaatagtaagtaaatttcgacgaatgagattcctgttgtttttaagctgaaaacttaaaaaaattaaaaaattggaaagatctgtacaccatattaatattaatattgtattaggtaatcagtattaggtaatcagtattaggtaatcactcacgtgaccattcattacgtaattatgaatttaaaattttttgagtcattcttcttatcatgaaaatcaatagtacttaggattttaataatagaagtaattaattttaatttcgatggtgatggtgataaatgccacagttttaaaagcttttcttttttttaaatttttgtttaatacttttattatattttattataccttcttttattacatcacaaactatacaaacaatgtcaaatccaaaatataatataaatacaagaattgttaaagttttccatgaagatggtaatcaagcttcaattccaccaatttatcaatcaacaacttttaaagctgattcaattgattctttatcaactaataattatgattatacaagatctggtaatccaactcgtacaactttacaatctcatttagcttcaattataaattgtaaacatacttgggttgttaattctggtatggcttgtttagatgttatactttcagcttttttaaaaccaaatgatgaattaattgcaggtgaagatttatatggtggttctgatagattattacatttctttgaaagaaaatcaaatattaaaattaatcattatgatacaactaatttagaattaatgaaatctaaaattaataaagatactaaattaatccttttagagagtccaacaaatcctcttattaatgttgttaatgttaaagaaattacttcatatgctcataaaattaatccaaattgtattgtagttttcgataatacaatgatgactcctttattaatgaatcctttagaattaggtgttgatattcattatgaaagtgcaactaaatatcttaatggtcatcatgatattatggcaggtgttttagcttgtaataatgatgaaattgctaaaaaattatttttcgttataaattcaacaggttcaggtttagctccttttgattcttggttattaattagaggtttgaaaactttatcaattagattagagagagaacaagaaaattgtatgaaattagcaaattatttacaaaatttaaattttaaagttagatatacaggtttaaaatctcatcctcaatataatttacattttagtcaatgtaaaggtcctggtgcagttttatcatttgaaactggtaatattaaattaagtgaattaattattaaaaattgtaaattattttcaacaactgtttcatttggttcagtttcttcattaatttcattacctttaaaaatgtcacatgcttcaattgatccaaatgttttaaaagagagaaatttccctcaagatttaattagattatgtgttggtattgaagatattaatgatttaattaatgatttagataatgcaattagattagcaaagagagaattaaatgctaaattataattttataatcaaattttactttgctatttagttattatataaatattatatacgtaaataaaagaccagcttttattaaaaaaatttataaacaacaacataaccatccaaagaatgattttttacgattgttaaattcttcatctatatcatcattataatcatcattattataattattatagttttgatgactattaccttgttgtgaatacatatattgactaccactattattattattattattatttaataatcctgaacgttcatttacatgagatgcagaaactgctcttgttttatttttacttgcattggatagtctatgttgttgctgttgataatgattatattgattattactattattaatattattattatttgaatttgatgattgattatgtgtcataaaatatccattattagaataagtatgtgaatgtgaatgagaatttgatctttgttgttgttgattctttaattgttgtgcatataattgttgttgttgagatgactgctgtgcttgtacttgtgcttgtgattgtgattgattattattattattattattgctatttgacatattagtttgttgagtcgttgtatgacgtacacctgatccataaccattaagattaatttttttatttttattccaattccaaccttgtccatcatttaatttcatccaatcataatcaaataattcaacatcattaatataatcaaaatttgatttaatattattttttaaatcaatttcttctaaaattgatgcaaataatttaatatatccaaaataatcaggagtttcatcaaattttaataatctaactcgccgtatatattcactaatttgaattggtaatccattacataattcattaattggaattttttgtttcttttcaccaattttttcatattttaatttatttgttggtgcctttaaaccttgccaaggtaattgaccttttagaaaataaacgaaaacattacctaaactctctaaatcatcccttcttgattgttctctacctaaatgtgtattaattgacatatatcttgcagtacctgataatgattttctttctctataaggaatatgattatgattaattggatctctatattgtttaaccataccataatcaaccatataaatagtattatcatttgatgatgaaccaattaaaaaattatcaggtttaatatctctataaattaaattattttcatgtaaaaattgaattctttcaatcatttgaattgctaatttacaaacagttgaaattgaaaattttctaccacaccattcaaataaatcttctaatgaaggacccagtaattgaattattaaaatattataataaccttcttgaccaaaaaaataaactttagggataccattaatcgataaatatttatttttttcaatttcataatttttataataattattaattgcattatttaaaattttataagctctgaattcatcctttaattgaggtgcttcacttttacgtgattcaaatttaattgcaactggttgattagatcttaataaatcataacctttaaaaattataccaaatgatccttcaccaattttttgtgcaatttgataatgtgatgcaattatatttctatttttaccattagaacgtgatgttgttgtactacttactgatgtatttgcaggtgatgattgtgattgtaattgttgattatttccattgttatttccattaccattaccattcccagatactatattattaaaagtccctacttgattatcattcccattgccattcccagatgcatttcctgcagtggaaggatcgagagatgtcattgttacagttatagaatagataataaagcccaagataagaacaatttaaaaggaacaaaattgataaaagctcattttccaatttctatcatcaagccattttcaactgttttaaaattcacagtatagcacaacaacaactcttcgctatcttaaaatctttaagtggagaacctgtttatggggacgatgcgtcgatctattttttatcatgatttattatggttatatactggtttatatactggtttatgtacttaattatttcttgttcttcttcttgttcttcttcttagtcttcttagaggtgttgacactggaagtggtggtgtctgcttcttcaccttcttcaacttcttctgtagcttcagtttcttcaactggttctttaggttctacaactggttctgtaacttcttcagtaactggctccttaggttctgcaacaggttcagttatttcttcactagcttctttagtaacttcttcagtaacttcttccttaggttcagttatttgttcagtaacttcttcagtaacttcttccttaggttcagcctctttaattgatgtacccttaagttcattaacaacttgttcgacaatattatcttcaacaggtttattttcttcatcattaatttcagtactcgttggttcaacaggttcttctaattcatcaacagataaaacatcatcatctattacaaatgaatcatttgttgcaacattttccttacttggtgtaaaatctctttctttcttaataatatttggtgaaattattgtctcatttggtaaagtttcatcctctctctttatatttaatcctgttttagcagaattagtatttggaatagtattagtcttaacattattagtattatttctttgctttttcattaataagtctgcatcatttgtctttttttcaactaattcatatgaactatcaattttctttgctctttgaattgattttgattttaaaacatcaaaataattataattcttaccattatacatataatttaagcattcatcttcatcaatttcataatgatcatcctcaaattcattacaaacatttgataaaaattcactaaatgaatctgcaacaacaaattttgtattataatctctaccaaataaaataatttgaccccatttaccttcaatattaggatttaaatcaattgcaatattattaccaacattatccttaacgaatggtatccataatggatcataataaatttcattgataaaatttggtgggcaagatttttgaattccaaattttttttcattaatattaacattaccattaccattattattttcatatttttcataaactcttctccaaatattagtttcagctgcaattgcctctaaatccattaattgataatcaaatattaaaccacgagttttacccattgaaacttgaccatcatgaatttgataactttccctaaatgttgtaggtaatgtaatatttaaatcattttcaaatgcatttaaatcattaacagttgcaccaccttgaatatcatcacctaattcagggaattcagtatctaaccaatcatcaattttttcccaaatttcaaatatatctcgtattggttgaccattttcataatttcttaattcaatttgggaatcattatgtaattgagatttcatacctggacgatatggaattttagatgatgaaccagtttgtggtctattattatgtgaaacaagcgatgtagttgaaacattaatattgttattattatttttcatattatttaatgatgtggttgaaccattcattggacttaaaccattttttggagatgaaccttttgatgatccaagattatttgaattgtttaccccaccagtagcgtcatattgtgcataatgatcagatgttgtaacattatgaaaaaattccttgacatttttgaaaaaactcatagcaactaagtgtgtagtgtatttataattatatttgtattatatatatatgggtttataatatacaatacacgatatacaacgaagaaaagaaggaataaagaaaacaaatcccaataaaatcaacatcaacatcaacaacatgaacagaccttctcaaaaaattcaatttccctcacttattatttattatgtggattagctaattatagtctacatacacttacttacttacttacttacgacccaggagtatgtccagagtggttaattgagactgcgtggatggtcctttatctgtatcattgtcattgtctgctcctctctgagaagtgtattattgccttgattaactatttcgacgtgttcttgcagggattctagcacgtcctcttgctgatagtgaattacgtgatgaattggcggaattagtagtaagtccggatggtataggtatatcgaataaacctgttgatggtggtgatattgaattagattgggttgcttttgtattggatcttttggttatccttaggtgctgtgtctatctgtgtacttgtagggatattttcattggatgaaaacataattggacctgtatttgatttgggttttgattttggttttgatgtaatggatttatttggcttgacttcttcttcaagtaatttaacatcctgtaattgagtttctgtcttgattctcttggcaagttctcggaaactctttttaacatctcttacattatcagtaactaataaactatcaatatcaccatcactattaccattaccagtttctaaacttaatttttgtaataattcaatatgttcattctcctcagtttgaacaaatttatttaatatactcttatcttcttcatgttcaagtaatgtctccagtgtatcagtaactttcttcttagttagcataattaaatctttatcttgaattttatcttcaatcatactcagtatattattctctccatcatctaacatatcctttaattcatcaaaatcactatcatcacttccatttaaatgaatttcactatctccatcaataccttctccacttttcaataataattgtttaccattcttaccagtatcttttctttttataaaataaaacaacatcattaatatttgcaactttaccaacaaatctatttgaaaaaaatctaggattttcaacttcatatcctccagaatattcaactcttaacctaattaatggtaatggtatatcatcatctgttaatattccattctcaaacatttcaatattactatttttccatctgttatttgcattatctatcatttcttcaatttcctttgttaagtattttaaaacttcattcttattaaaactagttgccttcaatccagttttcgataatattatatctttcataacaaatggtctaacactttttaattttattctctctaatgaaaaatctttacccttaacattaagtatgaaaacatgcttatctaatgtttcaccttcacttaatgatgttgcaattgatgatcccgcctgtaatatataactaccagttatatcattttgtattgcaggatggtttacaatcatgttcatgtccccataatataaaatcaagcgttgtaggtaatgatgtttcttcaagtactttaactccaggtctatgaacatgattttgatgaacacacattaaattaaaccattgaatattttcatcatctcccgtatctggttctaaaaattctaaattaccacttgatattgtcttaattaacctttcctctctaatactatgtaatccatataatgctaaattagttttacccttattaaataataatggacaaactgtaattttttcattatcaataactctaccaaaatgattcaataaacctccaacacttaaaatatctaatggtgataataattcctctcccgttgcatcatcatgattcccacttatcgcatacattggcataccaacattaacattcatatcatattctgcaggatatacaaaatgtttagttgccattgcatcacttggatctgaaactaatctatattcaattggtttatcacaccaacattgttctcttaatgttctcattacatgataataagatttctttgttggtgaattaatatgaaataaatcaccaccttgaacaaccatatcaacatcattatctcttcctatctttaaaatttctgcaaatgtcttccatgaatcatctcctctaatttgatcattctccatatatccaacatgattatctgttgttaataaaatacggaaagtatcaggtcctggctctatatatgatacttctggcatactatccaggaaagaaaaaatatatcatcaagtctgatgctcaattgaacaaattgaaaaatcattctgtcttttattatatcattacgcgtactctttatataactttaaactgtacttatacatgctatacttgctgtccagcataataaactacatctctacataaaatagtaactcttttgaaaagtcttctccattctagatggatctccagttttcctaataaaatcaattcttcttgctacaagattatcagcaactttacttaaaactatttcacctgataatcttgaattataatcatcaataaaatcaattctaaatcgtataactccttgataaactttattatctttaacttgctgtgttatttgttgacattcaatgtcattctcacaatcaatgatattcaattgtgatagtgattcggttaataatgatacaattgtttctaatggttcaaatgagaaaaatcttgttaaattatctgcatatagttcaggatgtttaacaattttttcggttcttctattaatctcttcattaagcttcttttctctttcttcaatactaattgagttttcttgtctgtaaaattgtaatattgctggatccattgcaattaattccaaatccctttgatgtttaaaattacttatattctttatcttctttctcttactattctcagtatatggttgttgtgatgctgaataattgttcaaataaagtttaccactggtatcatctaaatcatcgataatatgttttgttattggctgtgtagtctatttttctcttattattactcctttgtgtatttgaatactctgtaactttttgaaattccttatcactcatattaatgtataagttaaccattaatcttgcagttaacttatttgcatccttacacatccccttatcattcaatagtcctctatctttaataacccattgatgttgtttaatcttaggtatagtaattctttcatctatattaggtacaagaatttttcttaataaacttaaagcacctaaatcaatcttattccatggattaaccagaatttcgcccttattcttaatataatatgtataatcagtatcttccataactggcatttcccatgcaattttacctgtaagtaaaacaaataatacaattccacatgaccaaatatcacataatgatggatcataattacctgaaacaatttcaggtgctgcatatggtggtgatccacatgcctttgtacacattctctttggaccatttttctttttaaatacaactgataatccaaaatctgttagtttcaaattacccattgaatcaagtactaaattttcaggtttaatatcacgatgagcaacaccttttgaatgtaaaaattcaactgcgttaattaattgtgtaaaataaaaatgtgcaacatcttgatcaactcctagatcaggttcgattttatcaaataattcacccttttcagctaattcaagtgcaatccatgcccaatttgtattatatgcaaaatcatacatcataataatattttgatgttgcatttgcttttgaatatatgcttccctagctatatcttcaggccgtattcctttctccattgcaaatggtatataaaccagtttaatagcaacaaatcttggatgtgaggcctgtgtttcacctctcttaactatggcaaatcctccatgtccaatagtgttccccaaagtgacgcgttttattggtggtaatggcgccatttgggaaagatggatacatttgtgacattatgttcgtttgtttataatatataatctatgaatatatgaatatacaaggataagaaaaaggaagaaactcaaaaatactaataactttgtggcaagtggaaacatgttttaaaatagatcaaactctttgtttacttttcatcgcgtttcattgtacatttcttaatgtttcaaagtgattaatcacagctggaaatcaccggttaaatcaccacttctgcaagatctgtaatccattcttgtggtacagggacggatataccttcaattcaccttctgataagtaactgaaatcaagatctgaaacacggacttttttaacaccattcatattttgttgaattatctcaacccattttaattttccatcactcgatgatttatctcccgctttaacatctaatacaatagctgtatgatctggtgatccacatgaaacgattctttgtggatacttgaaaacacaatttttaaattgtaaaatatcaccacgacgaatttcatcactagtactaggaacagttactttcggtatattttcagatcctgtataagtacaaattaatgcaccatgcacatatcctgtagatacaaatgcgtatttaccacatgcacgttcaagtgcatcatgtgctaatgtccaacattcaccattacctaccgtttgaccttccttaacttcacaccaattggctatatgttcaccaaacttttcatgaccttcttttaataatttagcacttgcggttggaggcggagtaaaacttgtctcactcgtaagagtatctaatggattagcatcacctttcttccaaactaattttaatcgtaatgttgcaagatcttctaatctaaatgcataaattttaaattctttggcaccaacagatccatgacttaattgataattaagaccttgtaaatcttttggtaatatactattatcatcctttgtaaaccataaagatgttatttctaaattcaaacttggttccttccatgcaactgtatttgcacttcttggtggtggagcaactggtgccttatttctacttggagggggtggtggaactgaacctgatgaaactgagttcgaagctgatcttctagatgctggtaacggtgctggtgctcttaacataatattatcattatcaatgttttgaacttcaaataattgcttggatttgacaggcgtttgaggttttattctatgaggtggttgcagttcctcatcgtttgttaatcctggtaatggaataccctttgaacgttgtgctgtctttcttacaggtaatggtggtctatcttcatcaaagctagtatcagcatctgcttcatgtctgagattttgtgcatcatcagatacatttcttcgttgaggtcttcttggtggttcaggtgtcaaacttgaatttcttgaatctcttctctcaaatctctcaggctcattggatctcttagttttcaaacttctgtatctatcttcatcatcatcgctatcaaaatcatttaattcatcattattcattttatttttgattttttctctcattttattcaatccacccattgcttgtttagctaaaggtcctgatttttctttagctgcatagtaactatccttggagaaagatttagcagtattcaaaaattgtgacgatgatgatgaagcagatgaaaatgatggtctttcctgtctattacttcctcttccatatccataatcatcatcagaggaatcgtaaccatgagaataactacctttacgttcacgttcgccatgttcatttgttcttgttctaggtcttggtgtaggtcttggttttattggtgttttatcattgttttggccattagaatgtttgtttgaaacgtgtattgatctttcatcttcatattcatcttcgtattcatgatcaacatcgctattagggatacctgcctcaatttcttcttcacgtgaagtttttggtgctggttttggaacattgtttcttctagtaggtaattttggtggtgctgattcaccatctattgttggctttcttgcaggtaatgctggtggaggaccttcttcttctttttcgttatttacttcttcagatggttctttctctttcatttccttttttggagcaggttttggaggtagtcttctagcaggtggtggtggaaaaacattgtgtttcaatggggatctcataccttcggcaaatgcaagagaatcattatttgattcactattgccattatttattccaacagatttcttcaatggagatttgaagttattgtgattcattgcatatgtcatagcaatatcgtttggatttctctgtggtggtaatggataaccttttttatcaacacctttcttgaatggacttgcaattgtttcatttgttaaagattcatcttgtttattttcttcattttcaggttcggaatcagaatcagagagatccattgacattttaattggtttggaaactactgaatcaatcgtcttttgatcaattttcctagttgaagcattagtctttctcaatccacctcttaaagatgcaataaattcatcaccattattgttattgtcgttttcattaacaggagtagcacttttcaattctggtttctttgcaggaacagggggtaagtttctaggtttgggtttgattggtggtggagggcctttaattgttgacattgcttattgaagtaacatatatatatatatatctatctattatataatattacaagtaggggtatatacctaaaagagttgaaatgttgatgaagtggacaattagttgtgcgtggtgtgttatgttaagttaaatatttgttacgtattccgtttatagcctttttcattgcatattatgcttaatttacattttctttttcgacaatgaagggattgtactctataattgcattattatcagtagtttcagctcatggaagtcatgaggaaacatataacaaagacagggaatttaatgaaccaattcctgaagaatataatggatcctgggaacaatggcatatggctcatgaacatcaattagatgattatacaccagatgcatttttccaaattcatgcagttacagatccaaaatatttgatgactaatgatattttacgaatgtatggtttacaaagagatgaagttgtcggtcaaggtgatggtatgggtaatcatgataatagtgaattagtttcaccagaattaaagaataaagtaattgataaaatattaggtatgatagatactgatcatgatggtaagattagtatggaagaatatttagaatatgcgactaatggtggtcagttccctgattttggtattggaccaggtcatgaatatgattttgaagaagaatatgaaaaacatcattggaatgaatttcatgcaaatgatgatcctgatgttaaaataatacataaggaagatattgaacatgaattattacatcatttccatgaaattgatcatgacgatgaagatactcatgaaaatccaaatgctccaaagcataatgtacgtaaaccaatattagttaagaatattccaccaagtttccaattttaatatctatagtatttttatagcaatcatactttataaacagtaataattaaaaagccaatcttcaacattattttactgatcgtacttgtttttttgataataaattaaattgaaaggatgtttatataagaagtaaatacaaaatactatatatcaaaaaacacaccttaataaaattgataaaagagaatatttgatattgaattatttaaaaaagttttaaatgaaaatggaaattaaattaaaaaacaaaaactaaactttataattaattaaattaaaagtcttcatcatcagatgaaacataagcatcacctaattccttcttcttcttcattctttccttcttcttctttcttaattcagctgatgataacttagccttcttcttagtagcagcaatcttgttacccatagcatcgaatttatcaccttcatcttctttcttagataatcttggaccagcaccttgaccttgaacccagttgtgaccagaaggaatcatcttaccagcttgaacagcccaaatttcttcagttaaattcttagtgaattcagcagagtgagtaataataataacaccaccttcgaatgcctttaatgccttggataatgcacctaaagaatctctatctaaataattggttggttcatctaagacaattaaatgaggtctttgccatgtacaagcagctaaaactaatttaaccttttgaccaccggataaacctctaattctggaatgggaaactaattcagcatctaaaccaagcatagcacaatgttcttcaatttcctttctggttaatggtctgaattgaccagatgctaaagcttccttcatatcaacttcagcaaccatcttggaatgtgattcaactaattcacctcttggtaaccatgcattatcaacagataacattggaacccatctttcagatttcataccaatgttttcacctaaagtgaaagaacattcatattcataagtgttcttgaactttcttctagcgtgaataccagcaattcttcttggggtaccttcaatcttgaagatcttgttcatagcttgttcatcattttcattaatttgtcttgaagctctatccatagtttctctatcttcaccagtttggaatctccattggatatattcagatggagtcttatctaaatgagaatcaatatgtgcgaaagcatgttgtttaatgtaagcaattctacaattttcatggacataaacttcaccagtagttggtaataattcaccagttaaaacattaattaaagtagatttaccagcaccatttggaccaataacagcaattctagatgataaagaacattggaagttaatttcagaaatttgtggtttgttagtacctggatattggaaagacatattttgaactttaacaatagccttttgtttagtcttaacaccttctaagaaacctggttctgggaatctaaattcaacagttgaagcatctaaagcttcatatgaagcagcagctgggactctcttaatgaattcagataaattacccttatactttcttaatttgtaaccttcataatggataatgtattgaacagttctatctaagaaaccagaatcgtgggaaacagtaatggaagtaataccacaagtgtttaagtagttaactaaccaatcaacattgacaacatctaaatggttagttggttcatctaataataaaatatcagcattctttaaaacagcctttgctaaagctaatttcatcttccaaccaccagataaagcggaaattggtaagtctaacatttcttcggagaaaccgaattcagttaatttagctctaacagtttctctgtcaccagtatcaccttcagcaacgacataatcggaagtggaagtatcagcgtgagtaccatcaatatcatgttcaacgtaaatagttctacattcttcttgagttgggaaaccttcaacttgaccatttgcaatagctctcattaaagtagatttaccagcaccatttggaccacataaaccatatcttctacctctctttaatcttaattgagttttgtttaataaaatctttgcaccataagctaaggagaattcacagttacataaatcttcaccttcatcatcttcatcagcccaaactggtggttgtggaatgttatcaacagaggattttctaaattcttcaataatttcctttgattccttttcatgtaagaaaatagttaagaaaggagttaaaacagaactccatgaaagaggatcaatctttctttcatcaattaaattacctgcaatagcagcaacgtaagttttaacaacattgaatcttgctggtttatcagaaactaatttttctaaaatttctaaattgactttaatatcaccagcatgggagatagctggaatagaatcatcttctggaactgcaccaactcttcttaaagtgtttaatgctctttcagtaacagctcttgcttctggatctgcaataacatctaagttaccctttaatgctgggaataaatcttgcatgaatggagcaacaacttgtggatcatcgactaatttacacatgttatcaacaataacagcagcctttctcttaattgaagtatctctttcagctaaacctctggttaataatggagacataatggataaagcagcagtagtaacttcagaaacgaaagtagtagcacctaaagcatggacggtttctggaacttcctttggatttgcaatagaagcaattaattttggaatgaaaggttcaatatccttgttttgaacagttgcagtacaagtagtcatacatttagttgcagcattcttaacatcaactttagtatcccacatagcttcagataagactgggattaaatcagtcattcttaaagctaattgaaccttagcggtttcaacaaaaatttcaattgcagctaaaatagcaactttttcttgccattttgaagtggattgataatctgtcaataagttttggtaagatatccttaatagcaacaggagtaattgctttaactaaagcattaagagctttagttgcaacttctctaatagcagcatctttatcaccagttttttcacaaatagcaccagttaattcaacaatgtatggttcaacagatggagataaatcagaagcggaagcaatatgagcaacagcttctaaagcgttgtaagcagtttttttgtcagagacagctttctttaattgttcaaagaattcaactggaacatcatgttcaataatttcaccattaaggaaagaagagacattagttgcagcagcatctaaattttcaggagttgcaacggacaatttgttgaaaagttcatttaaaacttcaacagattgttttgattcagcagcagcagacataatttgaatgtgtgatctgtgttaaaagaaacaaggttaaatgaaaggcaaaaagaagttaaaaggagacaaagagagaaaaggaaaagggtaagtaatataacagtaaaaaaaaaagttgggaaacgttgtccaatgtgaaaaaaaatgtgaaaattttgaaaaatttgagtcgacaataaaaattttcattttttcaattttttcaattttttcaatttctcttttctttttgttaactttttgacctgttttatatggcagtcgcgtctgcttacttttttttcattattattgtatgacactgcaaatgttgtggttgatctttatcatctgctcctatggtgggtagtattgattgattgtatggttagtagttgtaagtagtcactattaaatacctgtatcgtagtagtttaagtaggaattaatttataccacctcttttaaaattataataactagcttttttcaatgactattatgtttttctaattttgacaagccacctaaaaagacaaaatcactgttttacaaaactctttaacgactgaaaaataaccattttcagctgaaatatttcaaactagacaaattagggtatgataattacaatcagttataccaaatacattgcaattgtattactactagtgttatactgtgtggttattagtataataaaagagctgagcacagaccaggcgaagaagaggcatttccgttaattaccgcattgggacacttatcaatatatttaacatcagagttatcgattatttttaaaattcgatgagtgagactgattaaatagattaataactcagagcaggagactgttatcttctcttcaaagtcttatttaacctcgttatcttcctctttccaccgctagattctcaaggatatcaccttcttggaatcattaactattttacttatattttattccactttcctttactttactatacctttatatattcacgtttcttttctaatcaataaaatttacatattctaaaaacaaaaaatacatacaccaatgcttgatttaacatccccattatttccattagaggaactatcacctaaaacttttgttaaattacctaaaactcctcatgctgaatcaaaatctgttaaattatatataattttagctgaacctcatttatttttagaaggttttacaaaggatgaagttatgtcaagacctccatcaattttaagaggttgtgtttttttaagaattatacatcctgttaaaattaaagaattatcattaaaattaagtggagtttcaagaactgaatggcctgaaggtataccaccaaagaaaactgaattatttgaaactaaaggtattataaatcatacttggccctttttcaattatttaaataattatccaatatcacataataaaagaaataatgctgatttatttataccgaagaatgattccgacgtttccgtattctcattggaaggttcacagaataataataataataataataataataatataacaccagtttcatcatattcagatttaaaacctgttatgtcaccaactaatatattgaaatcttttagaagtcaaacaactttaagtcattcaattcattcatctgatttaaattcaactctttcaaatggtggtaataataattcatctgatgataataaatatttcccaccaggtgattatgtttattcatttgaaatgccaatacaatcatcattaccagaatctgtttcagttacatttggttcaatatcttataatttagaagctcatttagagagaagtggtacatttaaatcaaatttaactgctaaacgtcctgttagtatagttcgtacaccatttgaaaattcaaatgaagaaaatgaaccaattataattgatagagattgggagaatagattacaatatgatatagttatttcatcaaaacaaattattttaaattcttatttaccaatttcatttagaatgattccacttagaaaaaatcaaaattcatagattaagagtttatataactgaacatttagaatattattgtcataataaaaaagttcatagaactgaaccaccaaagaaaattttattgttagaacataaaccaacagctccaagtgataatttattatcattaggtaatgatgaaattggtggagttgaattagatttccaagttttcatacctgaatattataatgaaaaatttcatttacatcctgatacaacaagtgaaggatattcaatcacatcattggattaaaatttgtattagaatatctaaatctgaaccaacacctgaagatccaaataaacgtaaacaatatgaattatcaattgattctccaatgcatatattaagttctcattgtgttcatgcaaatactttattaccatcatatgaggaacaagttaaaatagactcaatcaataatggttcaacaactgataagtaattctgttaagacattaacaccgaaacataattcagcatcaattattaaaagacaatcaattgataaaatgatgtcacctagagtcgattcaattctagatgctaatttatttaaacctgattcaagtgtaccaattgaaatgttatcgcctcaggcaaaaccattttcaccaattgcatctccacaattaaatgcaattaatccagaattaagagagaatacatttagaggatttgatttatcaccaattatatcaccaatttcaattggaaatagatcaagatcaaattccaaagcaccaaatttaagaaatagagcaatttctccaatgatgagatcatcatcatcaattaatcaagttccagtagctgttagattaccatcatcgtcatcaattaatgaaccaccaccaccaccatttgttttacatcctccaacatactgccgaggctacagttgactctaataacaccaacaccaacaaaaaagtacctaaacctaaacaaagaaggataactaattcatcagttgaatcatctcattctacaaattcaggcaattctaatggatcaggtaattcaggaatttatttaggaggtttgaattcttcatctactacgtcatcatcatctgcaactacaaacaatacaaataataccaatacaaacaataataaacaacaaataaatacaccacaaccaagtactagaatatctcttaaattagcatcatcaatgaataatttatcaagattaggtaatttttcatcatcaggtacaggtacaacagctgtaagtatacctgatgaatcaactccatcaatttcatcatttttagattcaccaattccatcacatgaaccaataaataatcttaataatacttaataataattcaactataagtatgaattcacgtggtagaaatcctgaaagaacgaaaggtagtacgaataatcagacaattagtagggaacaatcaccatcatttgatttagcagaaaatacagatttaaagtttaagattacaccaattagaagtgcatcagcatcaccatttttaaaaccacataatgataatagatcaacatcaccaattagatcagcatcaccaataccaataattgcacaagatagaggattaaataaactgattaatgctacatttacaccaggatttacagttgataaaagtaaaaaagtaattgaggataataataatcatacaattgtttcaccattgattaaggttactaattctaatcataattctaatgatacaagatcaccaattttaacatcagatttagattctatattaattgcaccagaagaacatgaaatggagacatcaagtataaatatcccactattcaatcatagtattaataacggagatagggatttagatgatgaactgattaattcggattcttcggatgaagttatatccaatgggaaattatcggataattataatttacattctaatacgattggatcaattaattcattagatttaatgttaagtaatcaaagttccaatacaatatcaaatatagttacaaggggtagtttgagtggaccaaccggaataaataatagaaatgaaccaattttaggaggtatgtcattaaattatttaggtaatgaattaaatgatgatattgcaacagatataactaatatgaattttaataatagtaataataactataataatagaagtaattactcatcaagctctacatcaccaactaaacacaatacatcatctacaactcaatccaacggtatcagttggacaaagctacgtaatccaaatttataaaacaataactaagaataaataaaatgaagtaaaatgaaatataaaataaaatatcgcaccatcccagtaattatttttttcgcagtctcttccctattgttctattcaatacatctgttgatagttaaccgttggtgttccgtcggagttgggtgtgggaagtgattggaagtgattggaagtatttggaagaagttggaactttctctaacttgtcctttccctctgaaccctgggatatccaatacatatccaatgggatatagagtataaccaacggtaatactcttcacagtgacataattaattggtaatataaatgaaactacacatcccatatcatatcaaccatcggagagtattagtttgtcaaaagtggaaaataagctgataaattatattatactttagtggggacaattagaatattaattcgtttcaatttacccaccctccgggccccaacggttgcggtttttgtaatagtaatgtacttggcaaggttattgtaatattatattttatcagtttttagtgattcaattgtgtaattatgatgcgattagggatataattgtacgttaatgggattaactttctgggaattgcatgttatctttatctttcaaattttacttatcatttaaataagatcttgtatccccagtttcttttttttcttattttatctatttatttaggaatcataaataatatagtatagtaatgagacaagtatttaatagaagaggtgcaatgagtaacagtaatttatcacttatacattcacgtaataaatctggacttttcactaaaattgatctagattctgcaattgatgatgaaatatcatatgaaattcaaaatgatataccaattcaagttaaagtaactacaattgaattaagtgatgatgaacttaatgaagtaactgaatttcaaaatattgataataataatgtgactaattgtaaatattcacatgttgatggttatgtaagttgttataaacctgatagaaatcgtttatatcaaacatcaccagctcaaatggaacgtatgcaaaattatatgaaaaataatttatcatctcaaaagagaaattttgaattagttaaatatttagaacatacagctcatattcatggtacgagtgtaccaataattattgaatcttggaaacaaaaaaaatatcataattggtggaatcattcaactacaagaactaaaaataaatatttagttgaattatctcaaatagagttatcttatctaaataatttattcaattaaacttcattcggtttaattgattataacgaatcattttatacatttactatactataccatactattccaaatatttgcatcaatttcacttctaacttttatataccacttaataatatattctaatttttataatttaattgtaaattaccttttttaacgccaatcattaaatcttattaaaattatcctcaaacaaacacgtagaatgatccgatatataatttttccgtaaccaatagagaaaaacatgctctcatctaatattgactttttatagccgtttattccattgacgaaagataatgttttcctgttccttttgtgtcagtttacagattttcttaactgatctgcttttggttttgtttcttatatacaactctagatcccttcatatattcatgatagacattccactgtatccttcacttccttttgctttttataatttctcttatttcctcttaccaaattacattccccacacaatatacttatttcaactacttaaataaccaatatttattgacatgctatcccgttagtccatctaaccattaatttcctattttttccactcaattcattaccctaatataaagatttgaataactaatttacccaaataggtaatttttcatttccaattaggtaagcatagcaaactttattatggttagctcttatttggacattgttttaagaatcataatattaaaaaacaacatagaaatctaaaagtggttaaaaatgatattaaattaaagaatatttttattatacaagaatatcaaaaaacaatatttattataaagattatagaattaaaattaaaagaacataaagaacaaaattaactaacaaagaaaggtattaaaataaaatggatagaaataaaaataaatttcaacaaaaagaataagaagatcaaatcatttcttctttttgaatctttgtaaacgattgagtattggtgatacaggattaattcttttaacacggaaaatataataaagaacaatcattgcaaaaaaattgaaaataatgtaaacacagaaaaatccaatatttctccaacgatcaccaaatgaaattccaatactttcaagatattgatctgcaactgaatatttacaaactgcacaattttcagttgcatttggattattaatataacctgtattatattcaaaatatggtgttaaatattctccacatgtcatattacttggaggttgtaaataattatattcttcaactgcacattcaacttttctatcatgtaatgtaatacttaataaatctgaaacaaaatatgtaagtggtgaaacacgccacataaatttccaaaatcctggcattaaatcaggtggttggaaaacaccacagaatgccattgtaaaactgaaaattaatcccataataacatttgctgatggtaagtcaggtgatggataaagaattgctagcgctaatgatggataatataattgataaaagaaacaatatgtaaaccaccaaaatcctgctctatctgctgatctatcaaattgaattgggaaataccaaccaacaaaataaattgttgaaaaaaatatacaatatggaatttcattaacatattgtgcaataagtaaacatgaccaatggaatgtattagattttgattcacgaacttcaaataattctcttgattggattgcataagtttgaatttgattcataattggtgcactaacaactaatgtaaggaaagttgaaaacataacattttgcataccaacaattgtatgatttgccttccaaaatgagaaacctgtaattaaagatgcaataacattcaagaaaaatttaggtaaaacataaggaactgaacgatataattgataaaatgttcttttattaacttcataaaattgaaacatataaggagttgcaaattgttttttcaattcttcatcaacaacattttccttagatgaaccaatttcgaccagttcttcaatttttttagtaacttcagaacattcattactttctaaccataattcatgccaatctttattaacggcagatgttgcacctgcaccaatcacttctaacatatattcagcaggattttcagatgttaaacattccctacatccacgactttcaaaataattcaataaagttcttgaattttcaccaatttcaccaaaatagacagtttgacctccacgtcttagtaataataaacgatcaaattgttcaaataaaattgctgatggttgatgaattgtacataaaattgcttgacctgcatttgctaattcttttaaaacttgaacaattgcccatgaagattgtgaatctaaaccagaagttggttcatctaaaaataataataatgaaggtttagcaactaattcagttgcaattgataattttttacgttgttcaacatttaaaccataacctggaacacctgcaattgaatctgcataatcttccatatgtaaaatcttcataacagtttcaacataagcaattttttcttcatcaggtacacttcttggtcttcttaatcttgcactaaataataatgattctttaacagttaattctgcaatatgtaaatcttgttgttgaacataaccagttctacgttcaaatgattgatcaacaacatgaccattaacaaacatgtcaccggtaactacaccaacttcagttcttctggataaaacatttaataatgtagttttacctgcacctgattcaccaattaaagcagtaattgtaccaggtaaaacaaaaccttgaatattatctaataatttcttttcaccaccatcatatggaacaacataatcaacatttttccaacagaaaatatcatcagaacctaatttttggaaaacagattcaccagttgatgatgtaacttcaagtttttcattatctaatacagcctcattttcaatatctttttcaacactactattttcctcaacagattcagaattctcttcattatttttggttttatccttaacatcagctggggaaatttgtttgaaatgatcaatgattgcctttgaaactttagcatttttaataaataataatttatcagcacttgaaggtattggattataaatttcaacaacaattgcattaataattaaataaccgaaaatgaaaataaacataaatccaaaatttctccaacaatgaccaaatgaataaccataagctaatttaagataaatatcaccactaacatcatttataccatcatataaaattttagattcagctgcaccaacaaatccacaaacttgatttaataatggatcaatattttgatataatggaccaaatggaattaaattatattcaaaacaaggcattcttaaatgacgaaattgcataaccatcattgcttcaaatgcatataaaattggatttgtataagagaaccatttaaaccaccaatacatattttttgtttgaagcatataagatgaataaattgtcataccaagcattgtaaatccacaaaatgccatagctgatgctaaatttggcattaatgatgaaaataatgtaaataatccactaactgccataacaattaaattagtcattaataagaattgaaagaaaggaccaggttcacgtttcatatttgataagaaatacataataattgtaaataaaataattgcaactaaacgaacaggtaattggaccaattgttttgcaattaattcagcagatggatgatacattgtataagcatattgtttatttaaaattggtttatcttcaaataaaacaggagtttcagctagtgtcataattgagaaataaagacatgcaaagaagataataccacctcttgtaaaagcaccaagtgttgaatgaggtatattataacctaatgaaccaatgattaaagattgaataacagaagcagaaatgaaagtaatggtataatttctattattataaatactttgaactcttcttttacaacaaatatttaattgagaaagataattcaatgtataaaaagatttatttggactacccttttgttttaaaactttagaaacttttctaatatcatcaaatgatttatcaggattataaattttaagtttttcatcaattttaattaataatttttgatattcaggagaatttttccaataattttcaaaatcatctgcattatatggaatatttttaatatcaataccaggtttaattgatctagcagttggatcagtaacagcagttaaaaattcacaacttgtttgtcttttttcctttttgaaacccattttttcaaaatattcaacagcttcattaattggaccaaaataaatttgtctaccaagatataaaactgtaacattatcaaataattgataaatgttttctgaagcttgataaattgtaacaattgaagtattcttagatgcatttgtaattgttcttaaattttgagcaaattcaaatgcagttgaagcatctaaacctcttgttgcattatcataacaaaaaactgaaccttcagaaaccattgattcagcaattgacactcttttcctttcaccacctgaaatacctctaataaaatcattaccaactattgtcttttcaacatgttttaaaccaaataaaatttcatataaatttttcatattttcaatatattgagttcttgattcattatcaactctaacatttggggttttacaaccaattgcaaatgataaagtttgaccaacagttaaataagggaaatgaacatctaattctggattatagataagtaaatttttaaaattatgaaagaatttttttgaatcaataccattaaaagataataaaccatcagttctaatataagttttcttttcacctgataaaattttaagcattgttgaacaaccagcacctggtctaccaagtactaaagtcattgtaccaggttcacaaatacctgttatatctttaataacatttctatgttttggtaattttgagaaatcaaacatttcatttttattttttttaaagaatttatcataacaaagagtaataggtttaaagaaaagatctgaaatatctaataaaactgaagctgaagtatttttaccaacaactgttaaatctttgaaaataactgtttgacttggctttaaagaattatgttcttcattataattaaacatatactctaaaattaattttaaatcgaaatcatttggatctaattggaaagtttccatttcatttgcattcattgaagccatattatttgataattcagataatttttgcataactgataaacttggatcatgagatgtaattgatcttgaaattgaaccagatactgtacgatttagttcttcataatattctgttgtaccaggttctggtacatttgcagaatcagacattatacgtgggtgtcttataagattacagagagaaggtaataattaagaaacagagtaataaaaagtcaagtcccagttatgaaagagacatggttaagtataattatatataaagtaaacaacatattgaaagtataaggatatgcccaaaccagataatttaataaaaattttcataaaacaggattaaactttggtaaccaagaggaaaaagcaaaaacaaaggaaaagcaaaaagtgtatttaaaagaaagtgggttgctctaatgcataataataatttgataatcatgatacttgtcactaaattaatttaatttccggggtaatgaaaatattagaaattaccgactgataaccgatatattacgtaatatattatattacgtaatcttatttaacttaaagatctatttatcttgttaccaagttcctctggagtcattgttaaatgtttcgataacttattctgtccactgattgcattgcagaacactttataactaggtattaatgtcttacgtatatcacttgctaattgtgtcttataaaaattaggtacatctgccttattccatctatcacataaaatttcaactgatttaaagaaatcatctaaaaatttacctgtatcctttggtgacatacttaattgacctccctgtttagtacttgctgccattaatttagctgttaattgtgaccatccactacctgctctatccattgctcttttctttaatctttcacatctctctaatcctctttgtcctaatacttgctttaatgtacttgatccatttaataatgtatacatactatcccaattaattaacatcatcataccaatattctcatcttcaattgatccattaatattattaccaactccacttccaattcttttacttgccttttcacctaatgaaaaaaatgaaatttctaatgcatcagcataaaatgatcctaataaaaatgctgaatcaattgcattagccttttcacgtataaatccattaggtaatattgatggtaaccatgatccttgatttaatccttcaataaatctaatttgttgttccttaaatgtagaaaatgtcttaattctagttgcatttaacataaatgtactatctaaccctaaatttgctataccaccattattaataccaccaccactaatttcatatctacttctaatatcctccaacatccatgcaaatgatcccttagattcattaatacatttcttattcatttcttctaatgtactaattgatccaattttattttgtcccattctttgcatacttaaaacaacatctgaactaccatttgctaattcataaaacatactaataaatgctccctttcgtactgatataaaatccatacctttcttcaattcagcaatatatgattcaattatacctcttaatatacgtgaatatgctctctctccaatacctgatttttgtataattgaaatttccctatcatgtaatttcctaacgaaaacactatatttctcaaattcataacctccattataaagataattttgatctccattaacaattggtaacttaggtatattcttcatcatctcttttctaattaaattagatctttcctttgctaattcatcagttatatcaattccacgatcattgaaaaatttaataattataggaatttcattaaccccattatctccttcacgtataccattaatagctaaattacgtaaatctgcttcactatcacttattgaatcttcaacttcttctttcataccttcaaaccaactaacatctcgttgtaataattcaacatttttcaatgattcaattatatcaattgcattattactagattttaattttttcaaagcaagtgaaacttttgatgcaacttctctaattgattcaacttccttttgcatattaagtaaattacgttccctaatacgtataattccaacttgtttaactaatggttcaatatttacaattgctttacgatttaatctagctaatgaagccattgatgtagctaattcattggataaactactaactgattgaatttgttcagctaatactgcttggtctaagatatcactatctgtaatctccattgctatgtctactctcctaaatataactataactcattctctaccacacaacaccaactataaattcatgtaaaaccctcattccaatcaacagttcctaccactcgcttaaccttccccattgggaaacttttttttcaccatatttttttctccatttaaaagaaacgcaatgtccactttaataatattaatagacatactagtttcttttgaacttctttcatttaaacagcctcattactcaacccatcatctacctatggtgtcgggttccatttccttggggcaagatttatttgtgcctttttcgctaactctaggttcttttaccataaccttgcgtttgatagtagatgggcgtacatcttctttttaatttcttgtaatcagttttatttttcttatatccttacacaatggtttacttgatcaattaaatatcatatatatactatactacacaactctaggatattttctatcatgtaatggaactgggaataatcctatattagctaaatctgacatactccattcaattgcattttcagtcttccaagtccaatagaaaaatccattagtttgattgtaaatatctaattgtgcttcaattatacgacgtgtattaactttatcttcatctgtcatcttggtaaaatcattactaaatctacattgtccaataactcctgtaccagcaaatgaattatcatatcttgcacctctaccaacaccatttaaccatttacaacaatcagttaatgcagctgaccattctccaacaatttgaatttttggtaaccttaaaaattctcctactaataatttgattgatgtaatatgtccatcaatactctctcttaattgtgttggatcgaaaacttcatatctatgatgatctaaaactgtatctttatattctggttcattcataaaatttgaccaaaatggtgctggtaaaaaggcatcatgataaacaaaccaattattactcttctctctgaacatcttatatgttgtttgatcaaattcaatgattttaggtatttcatatctatcatgtaatggttcatttaaattttgataaccaattataacatcctcatattcaactcccccatatttatcataaatatattgtaaaacttttaaacctaattcataattagttggattcatccattgataaacatccctttgacctgaattatcaaaaccattttgtgaacctggaataccatgtaaatcaacccataattttaatccatgagctctacaccaattaattgcctttatcaaatattcttcttgacctgaaacataaggatcatcagctaatttagcaaatgcccaatatccaataggtaatctaactgcattaaatccatatgatttaattctaataaaatcagcttcagtaatccatgtatcccaatgttttcttaatcttgcaagtgcttcattaggtcctaacgatttacagaaattatattcatcaataggtgttcttgcctcagatccatcaactgatgcttgcttcatataatgatggactaatgaaaggctcatgtaaccaaccaaccaccaaggttaacaccattgattttttgtgttctataatcaaattttccagatgtaactggaggatttggtgctggtagctggagttcaaaacaggatttgatacattcaaatcctcatctacatcatcttgctcctcatcctcatcatcctcattctcatcatcatcatcatcagcaaataactttccatattcatcataagcttcatcatcttcatcatcaatgtcaacatcagtatctatatcataataatcatcatttttatcatcttcaacttcagagtcttgaaaatgaaattcaaaagtatcatttaatcccttattcaagtatgaaaaagtcatctttatgaccctcaatcatcatcttgccttttccaagtcttcaagaccaagagttgtggtgttagagtactgtgcataacttacaggatcacgattgtggaactcaaattgaaattgatcagatttattactataaaattctaacatttgaggagaatacaatacattttgtttttgttcgaaggaatataccttaccatgtaacatcccaaaaaaggacggcacatgtgagatatacttgcatagcaaagttgttctaatatcaaggtaaaagtgataaaagatagaggtaaaagcaggaagaaatggggataagtattacttgattaagatagcagattttatataaataccttcccaatgcggtaattttgattttcctttttctcattaaatttttttttgattcattgaatgatcattcatggcaagctggattccattcttttgtcatacgacaagaaacaatgattccatctaatatactcaacatattcacaaatacagaaccatcagacatttcatacaaggaagaatgtttgacatgtcaaataatgggttctgcaacttgtcttgtggctggtgcttattttatgtcaaatttgccattttcaggttcaaatacatcagttaagagaaatccaatttggtggaaaaattcagttaaaggtgcaggtgcaattatttttgcacttggtatacttcgtggtggtgaaggttggttatggaaccaagaaaaatattcaacaagtgaatcaaaatgaaaagttaaacgacgaaaatttatttttttctattagtttttacaaaacttactgtacataatatatgtgtattctatagacattaaaaaaaggcataatgttgatgatcagaagatataatcattgggaaatagtgtttaggatagtaaaaatgttttaccactactattaccaccaactatccaattttcagttggatggaaacaacaaacagccggaactgaggtcatacgttcatcatttatatgtgcaagcatagttccctctctactataaacatcaagacttttcttcatattggcaataacgaatttttcaacaccatctcttggtctttcatgccatctagattttaaaattgaaacccatcttccagattgacaattatgcttgatagtaacatcaggggttaagttttcatttatatcaccagtttcaggtttagcaagcgtggaaagataattcataataccatcacctttattcatattaaagatacgtattgaatcatcataaccattacaaacaatatcaccagatctattccaatcagtacaactaacacttaatctacttccatatgctgcaacacattgaggtcctttaacatcttcataaccagaccaaacttgatcatgtatatttcttaaatcccaaattctcatagttctatccaaacttgcagatgcaattaatttatcatcagtgggacacacagaaaaataaccaattttcttatcatgtaatctataatttgcaacacatgcatctcttctaactggatcacttactcttaaatcaaatattgagaattcaccctgtaatgttgttagataaccaatatttttatcaataaatttaaaatcagagatacctgatgcatccccccattgatcatcatattcaacaatacattttgatatatttttcgttaaatccattgtccttatagatccgtcatatgatgaactaacaacttcttctaaaacttcaggacgaacacatattcttgcaatatttttcctatgtggagtaaaacgtataatagctggttcatcttcagaatcatcatcaacggtccaaacaccaagcataccattagtatcacctccaaatactaatttacgattatttgaaggatgaaattcaatagttgtcattctagaatttgttaacatgatttgattaggatggaaactttcatataattctaatttatctaattcatctcttgcttgttcatcacttttctgtgccaaaggtttattcttaatttcttcaaagaaatcacccatagagaatgatttacctaatttttctaacattttagtatcacttataacttcagataattttagatcatcacttaatctaaccgattctaattcctttaatttttcttgtttaattttctcttcatctaatgcatctaatactttaacagcctctgaatcatctaaattaacacctgcaattcttcttgaacgacgtaatggtaatggtgcctctttctcgattttaactgttggtttacgcgtctttggtttaggtttaggtttcggacttgaattaccactctctgatttcccaaattcatttgctaactgtgttaaattgagttgtctcaaaagctccttattacgggcaatattcgcttgtctttgtttttcaaattcagagatagccattgctttgctaaacggtttaatttctaaccatcaatggctaatccaatatataactgaatgaaagtgatgataggaataagtacgcgtaagcaacaaaatttttttgaatcataaagtcgcgactatttttatttgagttacgtaattacatgaaaattgttatgccttcttgtaaaacttgttgatgtttcaaaaataaagagatgaatgaaagatattctttgagtagataactgggtaggatacaattattggcactagagaatgtccgggaaacctcatcgtacaaaatcccggccagtcggccaaaacaagggtgagaaaaatagatgcagatttattatcatctcaatatttacaatcacaatcacaatcacaattacaacaacgaacgccggtacgtaaaaatgctactttgaaagcaatggtttcacaagatcaaacaattttctcacctgttaaaggaaatgatgatgttgaagaggtaaatgattatgataatgagggagaagaagtaggatcagattcaggatcagattcaggatcagattcaagttccgaggaaaatgatgtgatagagatcgactcatctgatattgaagaagtttctgattctgaaagtaataagaaaagatcaaatgatgaattaattgaatctagataaacctaaaaaagtgaaaaaattgacgaattataatgttccattaaatactaaaaattggcaacaagttaccaccacaagttcattcagaattatcaacattactgcatttattgataccaccgtctttggactaacgcaggttttcaaaaatattctcaagtacttcaatcagagattattgaaccaattatcaagaaattttcaacagtttatttaccacctgtacacaaaaatacacagcgaatactaaataccagtcgtacaagtggtgactttaacttaacaacattacatgatgatcaaaccagactcacatctgcatatgatattaattcaaaacagcttgatatgctggcattacaattatccaaggaaaaggaaatgttagcaactgagaagaaatatctttctcaattaaaggataaatcaaaactttggcaacgaagaaaagctaatagattatcaagaatggagaatcaacttggagccaagttttcaactcttagtaatttattagatttaaggaaaagtggtgccaatggagcagatgatattgatctagtcactcatgaaaacattctgccgagatattgaaagtgataatgattctcaaagcgaagatgaaacagacagtgtgagatgaagcaagtgaatgctgctctccgaacggttaaataacaaattagatgatatagaatcaaacaatgaagagtctcataaactacacaattctttgatgagtttatatcagaaattgcaagaataaaattcatgcatgtaaaaatattatattatgtacaataattagaattaaatgtataatacaagaagaataatatagattgctaactaattcataaatgcatagagaggtaattgttctaaaataataggagtttcaagctcttttacatgaatatcatttacctttccatcgtaataattatttaacattacacctgccatcattggaggaattgacttatcaatagttccaatagttatatgagtgtatctgttacctactggtaattcaatctgctcatcacctttattaaatctcatcacatccgcttcaatacacattactttgttgttccagaaaatttttgtagctttaactgttgcattatattcttcacctataaagtgcctgttattcggtggaagattttccgtcattttactgaattcttcaacttgatttttgaattcatcattatacgttttccacattaatcttttctcatctccttcccttctcatggctgaatgtactaaagttatatgaaagtctttctgtacacgttttttctcttttaatgtggtaaaaaaatcaatgttattagattctataatcgatagaacgttttcagatggaacatggattccaaaataattgggttttagtttgtttattttcatctttttggtaaacacaggtttataatttttagcattttcaaaagcttcttgaaatctttcctttgttggagttggtaattcaacatccttcatgattttttgaagtttactaaccaataacttccatatttttcaaacttgaatctttctcagaaacatctaaatcaattatataatcaaatttagaatctggttctttacttggctcaactttttggaatcggacttataaaacctctcataattttctcagcattgacaataccatcagtttctactttaatagattgatgatcatcacctctttcaacaactctatttcttgtcaattcccataaagtggtatccttttttggagaacttgattgaatgaaagttcaaacaaatgaattttaatttggattttggaattgtatcattgagtttttcaattgaatcaaaaatttgctttctctctgcaaacttatggttattcttgtcaattaatcacaattggcttttccttcaaaacatctaatgcggcaacaactaatttatccttaccaggagtttgtatattatcattttgaacatgcccaataagttcaggaaacaaattcattaaaccaacagaggtggtagttttaccacatcctattgttgcaacagttactaaaacatatcttttcgactttgtttcaccgaatttcaatttcttcatctcatcctctaaatctaacatctttaattcatcagagataagtttcattgttgattcattcttagattcaaaatattttttccttaactctataattcctttattatccaaataatcagatttgagtttttcatcagtaactaaatatggcatcacaaatttaatataatccatacagatcaatttatgtttaccaaatttaatagactcaggtcctgtattaataaattgtttagtaacttctcttagttctctatataaaagatatggttcttgaaatttaaatttgaagaaaaaatctgtcaatttatcagtatcagggattggttttctacaacgtataacaaaaccttcaatttcttcatcttgaaaagttccagtttcattacatttttccattaatgccagtgtttcatcaaacgtatcacatactatatattttgtttctttgaatgcaaattgttgagcaaattggttaacttgatccattggatatgtcttgaattcaactgtatttaaatttaaaccatgtaggtacaatcccgctttatcatttttatattcaagaacatgttcctcaaaatcatcatcacaatattcacaaactgcagtaattttatatttgaatagtatcaatgctaaatcttttgaggataatgagttttgttctaattgacgttccagtgctttttgagctgttaatgcatgatttttagataaatcatctcgtataccagttgaatgtttagaacaaacaaccagagttccatcagaaagtccagatacaaaaacaatacacccattacttttaacagtaacagtgtatggaccaacagtatcacttcttaaagtttcttccttcactgattgaagttcattaatattgaagaatttatcataaccacaacaaacaatatctccattaatatctgtaaacaatccacgagcattggatggtaacttaactttcttactatagtagtcccattcattaaatcgccaactgtatagttttacatcagtcccatatacagtattttctattctcttaatattggttttcccattgtctgaactgactaaatcttgtaatgttttgaaaagtttgtgagattcatcccttttatgagccaatgtctcctctgataacgttataggttcaaacatagtgtttcgtatagttctagaaagaaaaaagggtgccttaaaaacagttaaaaaactggcatggattcatcactatagaaaaaaaacactacgacgaaggaggctcagggtttctacttttttcatcttttatagctacaaggaaggtaagtctttaacactgtatgaagtctatttatataatctaataatctaataatctaataatctaattaatgagagagttgatttcagtatcattgtatccaaagatgtacaatgcatcctttaaagagtctgagttcaaacgacacggagcttctaattgaacttttggctttgcattccatgcaataccgtaaccagccttatgcatcataagtaaatcatttgcaccatcaccaacagcaacagttttacttaaatcaacattattttcaccagctaattgaacaagtaaatctcttttacgtgcaccgtcgacaatatcaccaatagtttcaccgcttaacatttcaacaccatcaacggtttcagttttaagtaaattagcaaatgcataatcaagatttaattgttccttaacatattcagcaagtggtaaaaatccacctgagcaaacagctaacttacatccagattttttcaaaactttacataattctttggtacctggagttaattgaatttgaggtttaagatcatcccaaagagtttgtgatttaataccttttaataatgcaacgcgagctgcaagtgattgtttgaaatcaagctcaccattcattgctctagttgtaatttctgcaacttgttcctcaacatcagcttgtgctgcaattaattcaataacttcttgttgaattaaagttgaatccatatcaaaaacaactaaacctttatttttacgattttcatcatttttttggaaaataagatcaacatttgaaagattgatttcttttatttgatttaatatatcagtttcaacaatttcaatagttggaatatttggatggaaatttgttaaatcaatgtccacgtggaaatcagttgcttttaattgtgataaaacagtaaatgaagtcatccttattggaagttttttcaaaatttcagatatttcagcattatcattatctgaaaattgtcccttcttagcaatagcggtaagtacgtaactcattagcgttgtttggataataaaaagtgttcaatgctgataagtggaatcagtaatggaaagtaaattaaatttctcgataatgaaaattgacattgaaaaaaaattgacttcaacagttttatgacatgcatgtccaaaggaagaagaaggagtgtgtttctataactaaccatcaatggatccattacctacatcaacggatacaactggactttccaccgccatgtttggtggtgcagttgcaggtattgttcaaacatcattaacgtatccattagaatattttaaaacaatttcacaaattgagaataaatcaattatgcttaaggaaggtattgtaccacatgattcaatgagaccattatttacaggttgtttaccattaagtataggtatggcaattaagaatgcatcaagaatgtttatatttaatggattttcaaattttatgtcagatagtaataaaactaatgcaccacaagttgttgttgcaggtttaatgacaggtatgattgaatcaatttgggctataccatttgaaaatattaaagttagaatgattgaaaattcaatgattaaatatgggtatcgtacaaaatatgatgaagatgcagttgaaactaagaagtcaaacagtgttaatagtacaagaataagtaatagacctgaaattaaacaaacagctagatcaatggcacaagattttatgaatgaaccaagaatgaaagcaattttatattatcataataatccatcaactaattttaaaggtatattaaaggaaatgtattcaactggtggtatattatcatttacacaaggttcaagtataacattattacgtcaatgtatgaatagtatggtttggtatagtacatattcaacaatgagacaaatgattgatccaagtcgagattcaattagtgaattagaattattaggtatgggatttgcatcatcattagcagttatcggtataacacaaccaattgatgttattaaaactagaatgcaatcaagggattatagaattatttataaagatatgatgacatgtattgtactgatatttttcaaagaaggtgcaagtaaattttggtcaggttcagtacctagatttgttaaaattagttgttcatcaactgtaactttaggtacttatgaatatgttacaaaagctgtaaataaattatctgaaattaaaccatttgcaccataggtatagtatttgaggatataatatataaagatataaagtgtataagtacacattttttttatttaattacttataattaatttagcaggtttaatacccattaaagcattcaataataaaacatattcaccatcctttaaatgacgagttggtacaataccttgaataatttgaccattatctaataacatttttcttacaactgaatccatacaacctaaacctaaatgaggtgttatccatttataaacaacttcaccagttttagaatctttaatttgtctccaaaatgcaacacttgaaattgtaccttcagttacattatcattattatcaatcattaaaacttctctattatcacctgggattatattaaatctttcccttgctttattaaaagtatctctccttgttgttttaaaagaagtaaatggggattgaatactaatttctttatcaagataaatttcccaacctgtccaatctcttaaatattgaggtattgaatcattacctttttgaatttgtgaataatcaggtatttcagttgataattgatgagatgaaggtaaaggagcaaaatctatttgatattcaccatcatttgaaataaagacacgtactctattagcaattgatttatttgcattttgtaatgcaagtgataaatgatgtaataaaatatttttatttaatgatttaacagggaaaccaaaataattaccagctcttttcaatctaccaacatgttcatccaaaagaaagaaaaatgattcatctaaaggtatcatatcaattgctcttggtatatcatctggagaacctttataaatcagtggatcaaatctaattgttgaaaaaatttggaaattttcatttgaaaatgctaattcagattcacttgttggaagtgatgataaatttgaagaattaagaatttctaattctggttcaatatctaaatccgtatttgtttcaaaatcagatgatgacaatggtgaatttattgaatttttaataggaaaattagggaatgtataaggttgagtaaggtaatctttacgtaatttctcagcaagtatttcaagttcctcttcagtgtatatttccattatgaatatatcatccattagataataaaggaaagaaagaagttaatgaaaagataagaaaagacaacaaaagacaagaaaagttaataaaagcaatttatgctaatttaagcgaaatgccggattttaaaattttaattaaccggactcggactttatctccactatgatgatgattattcaatggtatagtgaagtatatatatgtattgggagtatacaatacattggatagtaaatcagtaggataataactaagtaactaagtattagaatatataaattatatagttgatttaataatttcaagtatttcattaaaatctttaaattctctatatttaacattatctctttgacaaatactaattaaatcacaaccttttttagctaataaaatatcacaacttctagcagctgaaatatcacttacaccatcacctgaataaattaatggtcttttactatcattccaattattaattatattaataatactttgatttttatcatgaccaaatgatgtatcatctctatatttaatttcccatgtaccatcattatcattaattttaacatcatttgcaattatttgtatataattacgtaaattatcatcaggtaataataattgtaataattcttttataactaatgacataccacttgaaactattataacaggtatattattttgataacaatattcaacagttggtttaaaacctggatctaatttaatatgatttttaagataattaatacaatcatatatagaatgattattatttgaaactgattttaacattttatcaaatgcaattctgaaagatgtttcattattgaaaatttcattattaagtacaagtcttgaatttttacccattccaagatcatcagtcagtaaatcattacaatcttgaagtgtgactgtaccatcccagtcagtaaataatgccattgtttagttaaagaaagaaagttaagaaaaagtattaatgaaagatatatagatacacgccttttttaaacttctacagccacgtaatcataataataataataataataaagtttataatatgatcttctttacactttgtatacaatgaaggtagttgtaatttcaggtggtacagcaactaataatataattgaagaatttttaccaagtaataaagatgataaattaacatttattttaccagttagtgataatggagggtcaagtggtgaattacagagaattttcggaggtttttcgattggtgatattagatcaaggttagtaagattaatgacaaatgagtcgatacaagagatattaatgcatagattaagtaatgatgaaatagaggcaaggaaagaatgggagaggataataaatgataaggaaattgatattattattagaagttttctaaattttatggatgttcaaatagagggtagtgatatgaaattagctagggcaagtattggtaatatgtttttatttggatgtaagatgattatgggtatgaaagaagcaattgaattaatgaataaaattggaggtataccaaataatatacatgtttatggatgtacatatgaagatgttaatatttatgctaagttagcaaatggtaaagttattattggacaaagtgagatatcacatccagttgatggtaattcccaattaatgattgataaagaatgtgaaattccattagagagtccaataaaggaagttgggtatgtaaaagaagaaggggagggggagggtgataatgatgataaatttgctaatgatgagacattacaggcaattgaagaagctgatactattgtttatagtattggatcattatggacatcaattgtaccagttttaataactaaaggtataagtgagaggattagaagagatcaaagaaagatattattacttaatggatggccagatagagagaccaatggtatgaatagagaagattataagaatactatagcacaagcacttgataaaagagtagatgaatgtatagacatagttgtagatccactgattgagagtatcagagatagtatttataagacaaaccctcaataaagagaaaaccctcgctttctcactataaaagaaacgctttttcccacttatgtcttattcttagagacttacctactagttaacgcaaaataacacgacaaatctactatgtgtccattcgaggcccctagggaggcccaagacaataggacgggttgtatcttctatttgtagaatcttctatttgtagaagatattgtcggagagaatagtgaacggatcttgggtgcagctagtgacaaacagtcttcgtactgactgatggacataggtgcaaggatacgttgtacatattgtaatagtaatagtaagtaatagtaagtaataccttccttatataatacaatagaaaagtaaaaatttcaccccctctttactttgttgtggggtatatgacagtgcgtattaataatgactgattatgattatgattatgattatgattatgattatctcatgataattatatcttcctttgaataatcttctaggagataacttatttctttgctaatcttatataaatatactatactatactactactatacactatgatataccctttaatacgtttacattcgaatataaatataattaataatatacgctatatacgtcgattatcaactatatcactaaaacctgtatcaaatttaaagcaaagacaatctccaacttatgcaggtcattcaaattcaattgttaaatctttaatttggtcaactcctccaaataatatcttaatagttaaaaaaccttggcattcaaaagttttagatgcaactttacaatttatacatcatttacataataattatccttctgttaatataattgtcgtacctgaagttgcagaggaattaaattcattatctgaatctaataatacttgaaataatactgaatcaaatacctatttatacaggtcctgttaatgaaattattactagaactgatcttctagtttctcttggtggtgatggtacaattttacgtggtgtttcattattctcaaatacaactgtacctccagttttatctttttcattaggtacattaggatttccttttaccctttgattttaatcatcatgcatcaagcttttaaacaagttttcgaatcaagatcaagtatacttaaaagagaaagaattgaatgtcatatagttaaatcaaatcatcatattgattccccagttatttatcaaaatactaatcaattaaatacaaaggaggaagttgatcgtcttaaaagattatcagctgcaatgaatgctccttttgataaattaactgttacttctgaattagaatctttgaaaaaagttaaaattcatgcaatgaatgatattgtacttcatagaggttcattacctggtttattaagtcttgatgtttatattaatggtcatttcttaactagaacaactgctgatggtttaatatttgcaactccaactggttcaactgcttattcattatcttcaggtggttcaattgttcatccagttgttcaatgtattttattaactccaatttgtcctcgttcattatcctttagacccctcgttttaccattaaattctcatatcttaattaaagttattggtaaggaaaatgttaaaattgattatcaaaaattaaatgcaaaattaagtattgatggtatacctcaattaagattaatgccaaatgatgaaattcatataattagtgaatcatcttcaagattaattgatgataatgaaattgatcaaaatattcatgataatcatgataatcatcacaatgataatcacggtacaaaaagtattaaaaaattagataaatctggtgtttggtgtgtcgttcaatcaaagggtgattgggttaatggtataaatagtatgttaggttttaatttaggttttaaaagtacaaaaaactataatattgataataacgaatgatggaaaaccagagtagacttctatataatatattatttaaaaaacattatataatatcgcccttagttttaacaatatcttcatcatgatcataaaattcattatcgggtacaattcttgcatccctcttcattaatgaaccacctcttgtatcaattgaattcttttcatcttcatttatatcatcttcaaaatcaattatatcccttggtgtatcttgcatttgaacacttggtgcatgttttgcattttctaaattagtgaaaatttgtgtcataattctatttaaatattcaggtgtatttgcattatgcatattacttggtttaacatctaatttataatcaggtccataatattcaaaataatcattaaatggtaattcaggacctaaaattttttgatttaataaacctgtctcaaatgtccatgtacgtgaaacatttctcattgtatatcctcctccacctaaaatcattaatggtaatccaaatgatttaatataattaatacaatttgcatgacctttcatacttaaattaaaacaacctaatctatcacctgataatgaatctccaccacattggaaaacaattgcacttggttgataccaatcaataattcttttcattacaggttcaaataaatttttatatgtttgatcatcaattccatcacgtaatggtacattaattgaatgatatttacccttaccaactccaatatcccttaattctcctgtacctgggaaaaattcaccatatttatgaaatgaaactgtcataactctatcagttgtataaaatgcttcttcaactccatcaccatgatgaacatcaatatcaatatataaaactcttggatgatatcttaataattcaacaatacctaaaacaatatcattaacataacaaaatccacttgcttcacttttttttgcatgatgtaaaccacctgcataattaattgcaatatcacatttaccacgattaagtcttgctgcaccttccattgatccacctccactaattgaacaatattcaaataatccatcgaaaactggacaatcatctccaacattaaattttaattgttctttattaaacatatctaaattatcaggtgtaactctagcaaggaaatcaacatattcatctgtatgaaattgtgtcatttcttgtcttgttgcaggttttgcacgataaatttccattgatttatgtaatccataattcattataagtgaatgtgccattctaatacgatgtggtttcattggatgtgcagatccatatgaataattaccaacatcactatcataaaaatatgcaattcttttcttatcttgaggattaacagtaatctctccaaatggtttatcttcatataacattactagtttgtttgtttgctatgaagaattaatgaaagaaaacaaagtggaaatcagttaagataaaaaaatattgagattgtaattgatttagtgggaaatcatttactgccatagttttttatttttcaaccttagtttggttagctttactttatttcaatggtatttatttatttacagaatatacattatatataacaatagtaataacaatagtaataacaacctattataccctactaaactctccagataatctggcaattaaatcttgccccctatcattatcaaataatatacctccattaatatcattctgtaatccaattggtaaccaagttagtaatccaaatttcataactgaatgccaattatttttccaacctaaatcaaatggattatcaaatctacgatgtctatacctttgtttctcatattgttcaatagttgttctattagttaataaattataaatcgtaaatcctgtaaatcctaataatgataatccgaaaacaaatcctaaaattgcaacaaacataacattaattgaaatcataccattctctaattgtttccaaatataccaactacttaaaatccctactaatattgaataaattgttgaataaattaaaaattgaaagaaaaatctatgattcttatatccaatacatgtaccaaaccatggacaatgatgatccatacgtaaaatacatttatcacatccactacaatgatgacatctatcaggtttccaaactttacatttattgcaaaatcttgcattaccatcagatttaatagtaacccattgtaatgatattggaggtggtattaatgaatcaatatcatttggtataagttcagggaaatctaatggtgatccaggtccaattaaaataactctccaataacaagttattgttaatattactaaagatgtacttattataatgaaaattccacctactgttccacttttttcagctaaaaatattgttaaatctcctgcaactacactccatgtccatattagcaaaactgtcacaaatgtcccagggacagctgtgctccacattgtttcataaagaaaaatggcttataaattgtatatgcttaaatcctgtactccttaataaagctttaatattatattatccacttacgtaagaatatacatgctatacattataaaaccattttaaaacactacgaatgaatgcattgacaacaaattcaagtcctaaagtactcttaactccaactacttccatctcctgataattctagtaatctttccaatgtaattttccaaattgatgtacccttagtaacagtaattgaaccccaaccacctctttcacatgaaattgtaatatgaccatcacctgaaactataactccatgattaacaagtgatttaacacttaattttttacctgaattatctttcttccatttactttgtcttttcaataattttttaataaaacttcttttcaatggttcttgatcatttgaagtttcttgaataattttagaatttaattcaattctaatactatcacaatattcatcatatcttcgttttaatgttgtactacgttgacgtaattcagttactatatcaacaactatatccttctccttttcccttgcttcttcaattgcacgtctttctctgatatcattggctaaactttgaacaattgtagcatatccatcattagaatcaacaattcctcgtctctctaattcaaaaatcatttctaatgtatgttttttagcttgtggtaaacttatattagataattcttcattatcacgtacaagttgttgaaataataattcatcagcaggtaacatttcactgactaatacttcaactaaatcttgtccattttgaacttgtaaaatatatattaaatatttcttaatttcatattttaatgtatctataacaattctctccatttcttcttcactatctttgacaattaatattttgctatatccgtatgaatcaaattcaagtcttttcttcaatgaaataccaccaaaatcactctctctcatttcagttaatgtataatacattataccaccattaattttttcttcaatgaaaatttcttcaacaaaatcttgccaaattccaattaattcaataacatcatcagcttgaatacgaataaattcttcacctgaaattaaaatttctcgttgataacttacatctaagtttgaaacattgattatttcattaactaaatctttcatttcatctctaatttcatcaatgaaaccatttaaacttgttagatatttttgagttttattattaaaatgtctcatactaccacatttttcaataacttcggaaactaattgtaaatttctagtaactctttcaacaactgataaatcatcactaactgcgaaaacatcaattgaataatttgcaggttgaataaatattggtaatacataacatttcatgaaaatacttaaaaccatactttttatataatcatcagaaacattgagttgtttattcatagtttcataaaattctttcattaaacatttgataaaatttggaatttcatgaatttttttcttaatattttcaataattaagtaactaatatcacgtaaattttgcatgttttgaacatattgggctgaaacttcatcaatatcaaatggttcaatatttccaacttcaacattaatcttatcatcattattgattactccatcttcaactaattttgtgaaaataacattaggatcacattcataatttatttcatcatcacttgtaattaaaaatacacaatcacctaatatttccttagtgaattttctttgttgtggtaaatttaaatatgcatgtaacaataattcccaatatttaatattccccatctcattacgacctttaaccattttcttgaaatcttcttcattgagtctgttcaaaaataaggtgaatgttgaaacaaccaatttcataaataagtattcctccttagttggttcaatattactcatttcatcaacatcattatatccgaaacatttcaaaatccaatcttcaatattaccgtatgaaaattcaacaatatcatcactcatttcaatataatttaaaactcttgaccaatattcaggcttactttgtaaaatataaaagaatgtacctaaacatttatccaatgtattatccttatgtttacttgtctttaaatcatctaattcaggtatttcaacatcaaccaattcacgtaaaactgcagttccattatcaacattactcttcaatccacctgatacattctttaaatcaattccaaattttttcaatgtttcaaccttaacctttaaatcacgtaatttatcaatttgcttttgaacatttcccttttccttgctaatttctttctttaattggacaatttccttaccactttcagatttatcacttttacctaaaacactaataaatttacaaactgcacgtaatggtggatcttccttcttaattaatgccttataatcttgaacaccatggaaacctctaatagctgcctgtaatgtacatattttacgtacattttcaggttttctaaaccattcatcacgttctctaatttttttacgtgtttgacaaccacgaattatactttgtaatgcaattattgaatttctttcatcatctaaatcttcttttagaatatcgtaatcaacttgaacttcaacagctctcaataaactttgaattgtgatgatttcattttgattcttcttcaagttatttcttagttcaaaatatgctttccttgtcaaaccaccacgatatgtgtgcggtaaaactactaaaaattggttcattatcataaatttgatcaatcatattgtttaatcttttacgtgtcaaaacacctctaccaatagattgtaattttgtaatttctggagtgtaaatttcatcaatttcagggtaattctcttcatcactttgataatcatcttcttgaataaatttatttaggccgactttagttggtgaatgttgtaatcttgatattgatctattttgttgtcgtggtggagtatttggaggggttgttgctgatgttattggtaaattaggagtataatgtgcatttgcttgttttgcaactaatcttcttggaacatgacctggaggaggtaatacgtatggttcttgtttttgtcttgggatatcaaatctttcaaatagttcatcttcatcatatggagcttgtaatggattttctgtagtagaacaagacttattgacatttaattttttgatagttttaattgttttgattttagatttttgtttaaaattattgatcctagaaggttttttaccattgattatatattcacgggtttgtaatccacgaattaaactttgtaatctaataataatattcatctcatgtaaaagagatttcctaatattccaatatttatctctaaccaagaaacctttcatatgagattgtaattgaattatttcattaatatttttatttaattcatttacattttcattcattttcatttctctatgtttctcacgtaaaattcttgacattttattcgatatatctaattcattaaatgatttttccttctttaaaagttttttacctttatttctttgaagtttaccacgacataatgcttggaaagaaataattgaacttgtattaccctttaaaatagcctttgtaacaaataaatcatatcttagtaagaaacctctagctaatgattgaaattgaattaatgcagtattaggatcaagggtactaattgataaatctttgatactaatggatttaacaattgtactttgacctaataattctctttcttcttcatcaattaaatatctatattttttctcaattgctgataatgaatgtattgaaggcatacttggaattgggttattaaataataatcttgcatctctgattgtttcttgttcttctgaattcggagggatatgtggttcattttctggtgttgaaggttgtgttaaatctaaatctagatcaatgtcagataatgaattatcatcactaattgttaaaaatgagaattcattgtcattagtttcatttatttcctcttctttgatttcttcggtttcttcaatttcttcaattttctctactaattcaggttttgcttcctttttgacttgtttctttgcctcaatttgaactaattgaagtctctttatatcatcatccacattaacacgtattgcctcttcgaaaccttcaacgtatttccttcctaatgtaccacgaccaattttatgtttaatttgctttaaacactccacattaatattagatgaacttaatacggtagatatattttgatcatcaggttaaacaaacaactgggtctgccttacctaacattgacattaaacaacttaaagcatgtaaacatgcaataacttttggtatatcttttttttcatataaatcattagtttcaaagatgaataaggatggtaatttaacggaacgtgtgaaaactaagaatttcataatattttcagtatatttaaattgtttattgatcattttatattcatctggattatagattttattaattgaatgatcaaaatgttgagcaattttagcaattaagacaccatttgttaaataatccgggaattgatcaatatttgaatcatttaaaccgattgatatattaagtaaattttctatccattgtttaatttctaacatacgacaaacaaaagttgcaagttttatattatctctatcattatctaaccatgttttaatagctattgatgaaggtgatgttaattgtttattaattttctttgtactaaaagttctaggtaatgatggttttaatggggcagttgtagtcttgttatgattattaggaactaaaattgattgaatatttttcaatttatttaagtttttagaagatggggaattagacataacagtatttataacacccattctatttatttcactctttgataatttatcctgtattggttctaatttttgagtaacgaaaacacttttacgatctttattaatgaatttattatcaggaagaggagtgaattgtgcagctttatttttctttgtctcttgttccttagctaagatcatttgttgaactgaagttaaaggtctttcacttttcttaacattagtagaagatggagagtttagttgtcttgaagtgtcctctgatgcatctatactacttaaaaaggcagcagccttagtcatacgtaatgatgtcattgtatgtatatagtagaaagggtttgtttacttttagatggtagtctacacacacgacacgactgaatgatataatttatcggttgaatcgaagaagataatttagttaaaattcatgttgtttacaatttgccgaaaagagaaacctctcggaaaattaaaaagtaaattaaaaaagccatcaccaaaattgcgagagaagccatagaaaataagaaaataagaaaataacttcgagaatgttccacatcttgaaataacgagccttcttgaaatttacagtgaacgtccattaatttacggtatcagtggcaatttctatataaagacaccaagtgtccactttttcaaaggattgattttgatttatttttcaattacctcctatctctctctcttttttgactttctactttaaacaacaagtaaaatcttataaacacgcattcaaacatgtcaaagactgaatcttatgagttccaagctgaaatttctcagttaatgtcacttttcattaacactgtttattctaataaggaaattttccttagagaattaatctctaatgcttctgattcacttgataaaattagatatcaatctttaagtgatccaaaagttttagaatctgaacctgaattatttattagacttactccaaaacctgaagaaaaaatcttagaaattagagattcaggtattggtatgacaaaggctgaattagttaaaaatttaggtactattgctaaatctggtactaaggcattcatggaagctttaactgcaggtgctgatgtctctatgattggtcaattcggtgttggtttctattctgttttcttagttgctgataaagttcaagttatctcaaaatcaaatgatgatgaacaatatgtttgggaatctaatgctggtggtaaattcactgttactcttgatgaatctaatgaaagaattggtagaggttcaattattagaattttcttaaaggaagatcaattagaatatttagaagaaaagagaattaaagaagttgttaagaaacattctgaattcgttgcttatccaattcaattagttgttactaaagaagttgaaaagaaagttgaagaagaagaagaaaagaaagatgaagaatctgatgataaagaaccaaaacttgaagaagttaaggatgaagatgaaaagaaagaagaaaaaactattaaagaattagttactgaaactgaagaattaaataaaactaaacctttatggactagaaacccatctgaaattactcaagatgaatataatgcattctataaatctatttcaaatgattgggaagatccattagctgttaaacatttctctgttgaaggtcaattagaatttaaggctatcttatttgttccaaagagagctccatttgatgtctttgaatcaaagaagaagaagtctaatattaaattatatgttagaagagtttttattactgatgatgctgaagaattaattccagaatggttatcatttgttaaaggtgttgttgattctgaagatttaccattaaacttatcaagagaaatgttacaacaaaacaaaatcttaaaggttattagaaagaatattgttaagaaatgtattgaaactttcaatgaaattgctgaagataaagaacaatttgataaattctatcaagctttctcaaagaatattaaattaggtattcatgaagatgctcaaaatagatctgctttagcaaaattattaagatataattcaactaaatctggtgaagaaatgacttcattagctgattatgttactagaatgccagaagaacaaaagaatatttactttattactggtgaatcattaaaggctgttgaaaaatctccattcttagatgcattaaaagcaaagaattttgaagttttattccttgttgatccaattgatgaatatgctgcaactcaattaaaggaatttgaagataagaaattagttgatattactaaagatttcgaattagaagaaactgatgaagaaaaggcaaaacgtgaagaagaaattaaagaatttgaaccattaactaaagcattaaaggatatccttggtgatcaagttgaaaaagttattgtatctcataaattagttgattcaccagctgcaattcgtactgcacaatttggttggtctgcaaatatggaaagaattatgaaagctcaagctttaagagatacttcaatgacttcttatatgtcatcaaagaaaattttcgaaatttctccatcatctccaattattaaagctttaaaaactaaagttgatgaaaatggtccagatgatagagttgttaagaatttaactactttattatatgatactgcattattaacttcaggtttctcattagaagaaccaactgcattctcaaagagagttaattcattaattgctttaggtttaaatattgatgatgatgaaactgaaactaatgttgaatcaactgaagaaccaaccgctgaagctgaagctgaatctgctatggaagaagttgattaaatgttttcatgaattaattgtatataactcgatttattatttatttatattacccttttcttaattgtttatatagtttaatacttttttttttacaaatctaactatacaatcgttcgtaaaataacatgtaaactgccttaccatcattaagaatatagtctgttgaaacttcacttattttaacatcacttattctccaaaatggtttatttaaaacactacctaatttcttacccttcatggtagattttgacttacctatctctggtatatcatttacatattcatcttcgtgtatttttaaatactgtggtttacgtcgataacattcataatgacctgatgaatgacttccttgatgtctaataacacttttcaaacgatatttaacatgagatgatgatgataaagttgttgggaactcgagtatttcactaattgatacattacatgcatttttccatgattgagtatctgaatacattgatcttgataaatgaattggaattatttctggagtttcaataaatgtattctttctaacaacggttgatttcttaagttgtcccagtaatgtttcattattgaatagaatggacttataggtatcattttcacgtaaatcatcattaattcgtaattcaccggacattaatgattcttttaaaatttgaatgaattcacgttgttcgtcattaattagtttaagtttatcagtattgaaaactataaatttagtgatgcaaacaaaacatgaataatcttcaataacttcatttctttccctttcaataatgtccattaaagtagttgatgattgtgattgtggtaccattagttctaacgtcattgttggtattttaactggttttgatatccctttacatgaaaaacattgaagtttagtctccatcactgaactaaatgggaaatgtggaatcttacctaactctttcttttcatcatctgttaatttagacatgaatgagaaaaacctattatattcatcctctaatgtctctaaaataattgcaaataattcatgtgcatcatgttgtgatcttgatatcttacctaaatgaatattctctaataaatgtaaaaaatcccaaactgataaagtttcaggtgaatgaatagttgattgtaatttattaagtaaattcatcattgataaatgtaatggcattggatatttaattgcaatttcaggtattttaaacattaacatttcttcaaaatatttgtttaattcgtataatggaactaatgattgaattgttgaattagcaaaacaatcatttcccgtgttaataaaacctgtagtatatttatcaggacgttttgatctctttatttgtgtgtcggcattcctatttgtaatggttggtattaatacataacttgcaactatcaatgaaaaatatacttcctaaaaaccatggatttttcctattcctgtaagaataaattttagcttttcgtataaaccagataatgtccatacttaatgtaatctatccatgatgattctttagtgggttctgttcgtactaaccctataagattatcaagaatccccattgctaaagaaagaatgaaatttcattgacatgaaaaattcgtaaactcggacttattttcaagataaaacgtaattcattaaaacatttaaaatacaaaatacaaactatataagggaagtaaataatattacttttgaataatgaactaaagctctcaccctttagaaacattatcctaaaataatataaaacttttatcacatttattgaataacaacaactaaatcacctgaatcaaccatatcaccattggtatgaagaactttcaagactttaccaggattttgttgaattaacaaccatttcagttttcattgcttcaataacaactaatccttgaccttccttaacttcatcaccaacattaattaatgatttccagaatctacctgaaaattcagaataaaccatttcagcatcttcaggatattcttcaacattttcttcaattttactaccagattttgataattcttcatttgcaacttgaattaatctcttaaattcatctaatttttcaccatcttgagttttttggaaattttcaatagacttcagaatttgcttgaatccatgataaatatttggtatgatcgaaaactgattcaataatgtcaacttcaaatttaccatatttagaatcttcaaccataacttctaattcttcttcactaactggataaaatgaaacttgatcaaatggtgttaataaccatggtttaccattattgaatttctttgtatattcacctaatgataatttatcccaaattggaattgttctaccaactaattgataaccacctggtgattccattgtataaatacacatatacataccaccaataccaactgtaccatttggtgtaaaggttcttgatgggttatatttggaacctaaaaatctatgtcttggatctaatggaactgcacatggagcaccaaggaaaacatcacctaaacctaaaactaaaaatcttgcagaatataacatatctttaacttctgatctttcaataccattaatatttgcaataaaatcaacattatttggtaaccatggagcatcagatctaattgtttcttggtatcttttaactgcatctaatgtttgtttatcttcaaatgccattggtaatttaacaactcttgatggaactgtccatttgtttgtaaatgcaacttctgattcatatgcaattaatgtttcaactaatgttttttgatgaatttcaaatccattatattcaattaaaacagatctaacaccttgtgacatttcaataataccaatagttttatgagtttcaaccatttcaattaatttatgaactctataagaataatttaaatccataatattctcaccatattcaactaaaatatatctatcacctgcttgtctataagtaacaattggtgaatgttcatttgattgataaactgataaaactggattttctggttcaattaaaccttttgttaaattaattggttcacctttgaatgattcaataacatggttttgattttcctttaatgataatgcattatcaaatgtaattggtacaaaggtaattgaatcacctggtttaacttgaccaattttccacatttcagcatctgcaacaactgcttgacaaacaaatccacctaatgaaggaccatcacaagttaaaataactggttcatcacctgtgaaattgattgcacctaatgaataaacataatcatgagcatttgatggatgtaaaccaccttcaccaccatcttttctagcccatttaggttttggaccaataagtctaacaccaaatctatttgaattataatgaactttccatggatttgagaagaaatctttaattgattcttcagtgaagaaatcaggtgaaccatgaggaccacatgtaacaccaacagtccattctttattagttgaaatttttggaattaattcctttggtgcagctaatggttcagaaactggacctggtaatgaacttgaagatgattgatttaagaataaaacatcacccatctttaaaactctaccattataaccacctaaattacctaatgcaaaagttgatcttgaacctaaatattcagtaacatcaataccacctctaattgctaaataagatctacaaccagtagttaatttaccaattgctaatttatcacctcttttaatattaattggttcatacatattaactaattcatcatttaatttgattaggaacctcaccaccagtaattgcaataacagtttcatgatggaataaaattgatggaccagttaaagtaatttcaattgcaggtgctttataatgattaccaacaattctattagctaatctatgagaataagaatccattggaccagaaggtggaacaccaattctccaatgaccaactctaccaggataatcttgaacagttgtataagcaccaggagctgtaatttcaaaagcatttggtttataatcataagaatctaaaattttagtatgcattttagcattttcaaacatttctgaatttgcaacactctttaaataatcaacatttgtaatacaaccatagacagttgtttcttcaagtgcttttcttaattttgataaatgcttcagctctatccttaccatgaacaataatcttagctaaagttggatcatattcagatgaaacaacggaaccagttttaacccaagtatcaattcttgcaaaatcagggaatttaacattaattaattgaccaggagatggtttaaaatctttaacaggattttcagcatataatctagcttccattgaaggcacctgtaactttaatttcttgattaaaatctggtgacatatcagcagcaatataaagcatccattcaactaaatctaaacctgtaaccatttcagtaattggatgttcgacttgtaatcttgtattaacttcaaggaaataaaattcatctcttttttcatcataaataaattcaactgtacctgcacatttataattcattgaggaagctaattgttctgcagcttttctcattttttgtctagttgattcaggtaaatttggagctggagtttcttcaataattttttgatttcttctttgtaatgaacaatctctttcaccaattgcaattgcattaccgaaaccatcaccaaacatttgaatttcaacatgtcttgaattttcaacaaatctttcaaggaagacacctgaatcaccaaaatatgatttaccttgatgttgaacagtttcgaaaactctttcaatatcatcttcactatcaactttttgtaaaccaataccaccaccaccggcagttgatttaaccataattggatattctaatttagctgcaatttcctttgcctccttagcagtagaaactaaacctgaacctgggactaatggaacacctgcattttctgcaatttctctagctgaatgttttaaacctaattttctaattgcatcaccagttggaccaacccaaacaataccattttcaattaatttatcagcaaaatcggcattttcagaaagaaaaccataacctggaataacagcttcagcacctgaatcaagaacagcttttaagcattttatcaatattaatataagtttcagcagctgatgtaccattaagatgaattttttcatcagcaataagtacatgttcagcatatttatcaacatcagaataaactgcaactgatttaatattcaatttttttaaagttttcataattctaacagcaatttcacctctatttgcgactaaaactttattaaaaggttttgattttgaagattttttagattcttcatccttaagataatttctccaaccaccaaatttagtaatatcagttgtaccattttgtaaataaccaaattcttcacaaataaaagatttaacccatttaccatcaattgtttcaactgatccaatacctaaaggttcaggaaccattgccatgaaagtaccaaaattttcaattggaactgcataaatttcaatttcaattgaatcaccaccttcttcaactcttctaagacctggttttgcaattggaccagtttttggtaatgcatataatttataatttttgttagttttagtagttgataaataagttgcttgaactttctctaattgccaatgtaaatggtaaacctttcaaatgagcaccaacaactgctaattgaatagaatttgataaatttggtgatggaattgatgagatttaaatcatctttaataccagcagatttagttgggatattaccaattgatctatcattagatggatatttttgtttgaaaaatctatttgctaaatctaataatgcataatcttcaaaagctttaccaataattgtaacaccattaggtaaaccatcagattttctaaaatcaacaggaattgctaatgctgagaaatctgctaaattacagaaattagtccaagtaccttgaattgaattaactttaattggatcattttgaacttgttcaatagttggattaagtggacaagttggaaccaataaaacatcaatatcattaaatgctaatttaactttatttaaaattgattttcttttatattcaaattcataagcagttgcagcatcataatttgcaccacctttaataattttagtaactgttggatctaaatctttttcaggtggtgaagttttataaaaatctttaacagcagaatatctttcggcaacccaagtaccttcatataaacatttagctaaatctaataaaggagtaaaatcagctggaacaatttctgcaccaatttttttaaaattttcaattgcagtattataaatttctttattatcattatcaccataccaaagaccattcatatcaattggaattgcaatttttaaatttttattataagatttaactaaattatttggtaaaattcttgaatattcacaattaattaaatcatcctttgcagttaaattgaaaattaattgagcatcagataaatttaatgcaaaaatagaatggacaatctaatgatttacaagcaggaacaataccataagttgacaatagcaccaacaggttggttttaaaccaattaaattatttaaagcagcaggaacacgacctgaaccagctgtatcagtaccaattgcaattggacataaacctctaccaactacagatgcggaacctgcagaagaaccaccagagacatgtttatcactgaaaacacaaggagttataccataaggagatcttgtaccaactaaacctgttgcaaattgatctaaattagttttaccaataataattgcaccattatctcttaaaagagaaacaatagttgaatcattttcaggattataagagaaagaaggacaagcagcagttgttgggaatcctaaagcatcaatattatccttaattgcaattggaacaccatataattttaaatttgatttatttgattttgattgtaaaattttccattgatgatttaaattatcaatggaagaaattgaaatccaagcaggatcatttggattaagtgattcaattaatgatgtaagagttttaagtgattcatttggagttgtttgttgatggaatgaagtccaatctgaaattgaccaaccaattgtattcattctatataaaggatgttagtattgtgatatatgatgggtggaaattagaataaaaatacttacgttttatagttgattaaattaaaaaaaagtaagactaaaagtgtgagagaatggagggggttaaagccttaagatttttcctttgattaatgaaaagaagtaaaggatagtaaactacgggggaatacgattagtttttatataatatagatcaaatgaaatgacggaataaagatacacggtgcatcatcacaattagataaaagataagaaaagaattaaaaacgccgttattgtttcaaaagaaagaatttaaaatttagaaaaatttttgacgggccgaaatgacagcttaattaatggcccttatttttctcggtattgacttccattgagtgtagtattatgtaagagtataatagccttatgaatgtacggtgtaccggatgattaagggtttattataagggttgtatcagtattagtaatagtattagtattagtattagtattaatattagtattaatatgtggtatatttagtatgtatcgtataaaatcggtgataaccgaagtggtaattatttgattattctgtggcgcatgtattgtataaggtatattagtggcgcatgagtgtataccatacttaatgtttaatagtataatgtaatgtattgtagataagagataaggaactgttaatgtagtgtgggaaagtattgttgttagtattaaattgatatgattattattattactactactatgtaaaatattgaagatggctttgtcatattggtaaatggtcaatttactctttttaggtggctcagtttctattactatttgttctcttttctgtatctttcctttaatttattaagtattttacagtagtagactactgtggatactattctataagatattatactcatattaccataggaagtatacaattagttacaagtattactgatttatcagagtgttaatcatatcacacacaacaaatcatatgtcatatgtcatatgtcataaaataaaagacgcaccgacgcgaaggctcttcaaaaatgaaatgaaaatttaattactcaaaacaaaacaaaatttcaaattttaaaatcgcataatactgattttgccctttttcgcccttgaatctattacatataacactaactttctcttcttttagaacaatcaaagattcattcaataatagtatctatatatcaataatatacttgtttaaatagatcaactacatcttcttttctatttctaatttctaattttcaaaaagtctttactaaataaaaataccccaaccccttgtttaataataatttctcaattaataaaatcttcttttattttaatactatattcaaattatgattaaaagaagttttattaattcactaccaattcaattgaaatcaattattttagatagtgatagtaacattgataataataataataataataataataatagtccaagttctactcctagtcctagtcttagtcctaatttagattctattccaaatgatcaattagaatttaataataataataataataataatggcgataataataataataaatcacatccttttgatgaatcaattttagaaaaaaattctcaactcgatatttcaactcaaaatttcttaattgataaattaattaatcaaaaaggtattattttcactgaatttaatgatattcaattgaaattatttgatgttgattcaactttatcatcattagaatttgataaattattatcaagtttaaataatcaatcaagaattttattatgtgaaaaaattaaattaatttatggttttgatagtttaacttctttcattattagattaattaatatcttaaattttaatactttcttctcaatctttgatattacttcaaatataaaattatatggtttttattcattaaattatatgaatccagttgaaattttagttaaacaaattagaaatgatttatttattgttaaatcttttaaagaatttacaattcaagaaatgaagaaagaacatgatttccatttaccttataaagaatttaaaagattaaatttaaatgatggtaatttagttgttgttaaaatcttatttaaaaatgaacaaaaaccaattgatttatcattaattaaacctttattacctaaaattaaaatgttacatttaagtttagaaaatgaatcaaaattaaaaccttttaatgatttaattgataattatggtatttcattaaattatttaaaatttggtgttaatagaggtacttttaaaaaaattccaattaaaaataatattaaaactttaaaattagttaatattgataatttaaattttattaatgatttaaaagattgtaattcacttgatgttttctttgataattgggaattaaggaaaaattgtgatatcaaatttaataataattttattattgatttccaaattaaatcaagcattcaaaatttaaaaattttaaatatttttcatacttatattgattcaaaagatttaaataaattaaaattatttccaaatttaactcattcaaaaataagttatgtcattttagataataaaggttttgatatgactgattgtattaatttacaagaattaaaaattcattttacttatcaaaaatcttttgatgatttagctgatattagtgataatgaaaatgaaatgaataattctcttacaaatatcttttggccaaaaaatttgaaaaaattatcaattacaattcataatattaaaaatttaattcaaaattttagtattagattgaatatattgaaaaaaattgcaaaacctttaccaagttcaattgttgatttatgtattgatattagttacgatactggtggttcaggtcctgaattatattcaatttcaagagatgatattttgaaaatttcaaatttaattaataaaattttaacaaataatttagaaaatttaaaattaaaaggtatttcaagatataattataaaattggtaaaccattaatttttagtgcaattaatttcccttcatcattaaaattattatcattaaatgattttattttagattataattttattaatttaccaaatttgaaaaaattatattttgaacattcattatttgattcagattttaaattaccggattctgatgaaattttaattgaaaaatgtactttcaaagatttatcatatattccatcaaactcaaataaaattgaatttaaaatgtgtacatttagaaatattccaacttataatggtgatatatcaaatattattattaataattgtagagttatggaacaacctgcaaatgatattttccaatttcaacaacaattacaaagaaatggtaataataataataataataacaataataacaataacaataataacaacaataataattctaataccaataacaaacagagaagaaacaataataaccaacctaaaaataaattaaatcaacaaaattctcaacaacaacataataaaaaacttaatgaccaaattaatgaccctaacttatatatgaattataatactcaatcgcaatcacaatcacaaactcatcattcaaattctctgccatttaatacattatcacattcaaattcaatcaatgaaattaattctaattctaattataacaataataataaatctcaatcatttgattataatacattaccacattcaaattcacttgatagatcagcaagtgatttagttaattttctgaatattaataaagatttagaatatcaactgaataatttatcaattaataattcatcacaatatttaaaacatttgaattcatcaggtcaacatactccaaatattgttggtatttcaagtccttcattaaatttatcaatttcatcacctccaatttcagttcatgataatcatacaaataataataataataatccattatttaatcaattaaataatttatatgattccaaatctccaccattattacaacaatcattatcatcaccaaataatcaacatttttttaacaatatcaatggaaccgatcatcatcatcatcatcatcatcaacaacaacaacaacaaccattaagttctgatatcacaggtatttcaatttcagatcatgataatttgaaaaagactaatactaataatagtaatatcaattcacttaatgaagattcatttatcaatcatatgttattatcacataataatccaaatatttcacaatcaattccaccatcatcatcacaatcagctacatcaactagaccatcatcacaatatttagttaatccaattttaggtgcaatgaatagtggaggtaataatagttcaattagtatgaataattataatgatttaaatatgaatatgaatttgaataatatgaataatatgaataatttgaatatgaatttaaataatttaaatatgaataatatgaataatatgaataatatcaatcatatgaatgcatttaataattttaataattcattcaatagttttaataattttaataataccaatatgaatacaagtattaatatgatgaatatgaatatgaatttaaataatagtatgaataccagtatgaacaatagtatgaatacaacaatgactaatccaatgatgttcccaactaatacatcaacaccaacatctgctaataatattcaagatggatcagtttcatcatcaagaaattcatttattgatgttgaaaataatttccacaattaaaattaaacacttttcttaataatttatttacttacaaaccaatcaactaaaagactctttcttattttcttgttacttattttaatttcaattttattacaatttcaactactacattctatataaaacttctaactttttttctatataacataacataacatataatatacaattaatcaataaccgaatttttcacagctaataaacttaacttaatacaaccttccttagttattgcacctgcaatgaaaccttgagaatgaacaaattcagcatcttcaataccacaagtttctcttaaaacattcttttccaatcctctccaactattagggaatttctttcttgattcatatgatgatggtttaataggaactgcactaactctccaatcatttgatgaatccggataaacaacatataatactttcctataacctttcctctctaaattaaatagatgttccttccaaggaacaaatttatctaaaactaaaatttgattataattatcattaattaatgcttccttaacaacttcctctccttgaaagaaactgaaaacaaaataattaatataattaacaacagctaattttaataattctacaactttctcaaattgttcaacaatatcaccattatcaccatacctttccactacattaattaatccaataccaattggattaaattttaaagttgatttattagaaacaccacatgaatcaacaattccaaaagtatatgcatcaattatttcaatccaatcaaaatacattctctcataaacaactccaattcgtttatcattaatatctaaacctgtaatacattgtataacacttttaccaaaagttttaaaaattttaccacataatgataatggtatcctacattttttattatcattgaaataatcaccatttcgttgacgttttattggatatttaacggtataattgggtatcataaatgatttacctttttgaaatggatgtataccaataatataatcgggaagtttagtagtgtaaagtggtacttgtttaatttcactatttgggtgaattattcgtaataatgtaacacttagtgcaatatgtaattgaaattgatcttcattagggatatgtattattggtggtgttgatttaactttctttacttttttcatgtatatgtggttgtacaagtgatattaattataagttatacaaaagtttgggaaatatacaaaagaaaaggtttattgtacatgataaaaaaaaatatttttttaaatttaaatttcaaagatgaatgtttaaaatgtcatatcttgaaaactgtgagttacatattggacatttacgcatacgtgaattaagtctatcatcaacacattctttacagaaacaatgtccacatgtctttaatgatacattcttaaaatttttacgacataatgaacatttagtcatacttaataatgcttcttgaatatcatcagatgaatcattattattggtatttataccttgatttttcaatttattctttaaatgttcaacttgtttcttctctgatgaatattgttgatgaattgttgaatattttttctctaattgttgaatttgaaatttcatttgagaaattgtggaatttaaatctttttcaatattaatcttttcattaattaatttatcttgtttatcaattttacttgttaatgaattaaatttggtaatataagttttctcaatcctttctaaaatttcatttatttcattacttacttttaattttttctctaattcaatttcattagatttcatcatttcaattaattcattttgtttagctaaatttaatgataatattttattttgtgatgataatgaatcctttaatctcattgcttgaaaatatttttcatctgccttagttttttcaactgataatttattaatcataatttcatattctgaattttttttaattttattatttaaattttctcttgttaatttaaatgcattttcaatttcctttaattctttaactaaaacttcattttgttcattaattgaaattttttctaattctaaacttaaatttttttctaattcatttattctatttgttaaagtttcattattatttaagagtaaatttataaattcatttttacccttttctaatttataaacattaattttagttaaaagtgaatctctatcagatctaattctatttaaatcattttcaattttcgttatataattattattatttgaaatttcagatttataattatcctttgttttattttcatttaatgataattttgattcaatttcaaataattgattttgaactttttccttatttaaattattaatttcaatttcttcatttaattttttattttcttcaattaatgatttaaatttacttgaaattttaattaattcatcatcatcattaaaatttttaagtttaaattctaattcattaattttattctctaaatttgatataaaattaattttttcatcaagttgtaatttaagtgattcattaataccttcaattgaagaaatttttaattgagtatcaatatcatttatagatgacacattttgttgttcttgttgttgatcgttttttactttagttgatggtgcctctacactattttcttttttaatttctgtgttattagtgttactgtctttattttcaactttttgatcatcattatcatcatcatcagatgcaacttcaccctttttaattaatttaagagatttagaattaattctatcatatttttgaacaatatcttcaattttttcttttaaagattgattatcattagttaataaagtaattttattatttaaatttgaaatttcaatatcttttgaaattatattactattattagttaataaatcatctaatttaacatttttatcatttaatactgaatttagtaaattagataatttatcatataatgtagataattgattatttagagatttatcatctacattaacagagactaatatgttattattattagtattagtattactactttcatcaatatttttttcgaaaacatttataaattgattccaccaatgaaataaagttgaattagccaatataagattattaagagaatgataagcattttgtaaagaatcatttaaaattgaatttttaacatattgtaaatgtaataatctataaattgcttgcttttggaaatatacgacatcatcttgagataaaggtatttcacctggaggtattgaaggattagaagatttagtatctaatatagtacataaccttttctgtaatacatgaggagatggatgtttcctcttagtcattgttagtatagtatagtatagtatgattatatgaataaactacaaagtataatggtcgatgttgatatattaattctttcaacaaagtcaaattaaatttctcgaccataataaacaacaatcgttacgtaatcacagtaaaatgttccaatattaataaagtggcaaataggagcggggaattggaaaaacttcaattttggtttttgagaaggagagggaaaaggcactctttttatacttgcaatttgtaaattgctaatttaatagctaataagctaatagttgccctgttttgccacccaatgtttgccaatatcgtcagagcctccttaagatcatctttatctgcttctttaagatcaactactttaaacactggtgctttcagatttgtatcaaatgtttcaagggatgatgtatttgcaagatcaattgctgtattgaaaacttttgaattaaagaatattaatgatgaaattacttcatcaactcaatttacaaaagatttaggtatggattctcttgattataatgatgcattagttgcattagaggaagaatttgatgtcgttttcgatgatgctgtagcaaatgaaattacaactgttggtgaagctgttgattatatctctaaaaatattatgcctgaagaagatatccttgataaagaaattcgttaagttatttcatatatattatatcttatttattatcttgtatatcgtccatatattatttatttatttatataatatcttaactatattattattattattactaattataaatactgtattactacctacatgagaaatatgaaaaaaaaatataatacgtattttctgtcataaacttctttctttaacgggacatacacaaaaacactatgcaagacttaaatgataaagtagaggaattgatcatatctgatggtaaatctgctgataattcagatatggaaagtattcataatgaaacaattgatgaattaactgaacgtgataatgaagatcaattaagagaaaaagaatcaaaggcaagagctgatgctttacaaaatattaaagatacttatggattaactgaaataccagattctacaattgaacaattacctgcagatgatgaattaacttcagatataccattagatacaacttatattgaattaattcatatgaaaattaaatctcttgaaagtttacatttagaaaatttcactcaattagaattaattaatttacgttgtaatcttattgattcattaaattcccttaaatatattgaaaataaagaaaaaatggaagaattagatttctatgataatagaattaatcatatctcaaaacatattaattcttttaaaaatttagaaaatttagatttaagttttaataatattaagcatattaaacatattgaaaatttaactaatttgaaaaatttatattttgttcaaaataaaatatcagttattgaaaatttagatacattggttaatttaattaatcttgaacttggtggtaatagaatattggaaatttctaacttggataaattaacttcattacaacaattatggttaggacaaaataaaataacaacattaaaaggattggataaattaactaatttacgtatattatcaattcaatcaaataaaataacaaaaatagagggattatctaatttaaaatcattggaggaactttaccttgcagataataaaattgaacaattagaaggattagagaatttaactaatcttacagtattagatattacaggtaataagataagtaaattatcttgtttggatacattaactaatttaactgatttatggtgtagtcgaaatttaattgatgattggaataatataagtaaatcagttaaaaatttaattaatttagagacagtttattttgaaaataatccaattcaaagaaatgaacctacaatgtacagacataagttgagattgtgttttggtaagtctttacaaaagattgatgctctctatcttgccaattaaattgtataaacctcttattaataattctttaataaccaacttaccccggagaaagaaaaagaaaatcactgaattttcaaaaatttttttatttttcgatttgatggaatgatggcggcgggggatccttgtttgaagttgccttaatgctcagctgattaagtttggtctttgtttgatctttctcttctttataaggtaacaatgtctgtaattacagtcaatactacaccttatgatgatcaaaaacctggtacttcaggtttacgtaaaaaaactacacgtttccaattagaaaattatacagaaaattttattcaatcagttttaaatgcaatacctgaaggtgccgaaaatgctcaattagtcgttggtggtgatggtcgttattataataaagaatttattaatacaattgctcaaatatctgccgctaatggtgttaaaaaattagttattgggcaacatggtatcttatcaactcctgcagcttctcatattattcgtaaatataaattaactggtggtataattttaactgcttctcataatcctggtggaccagaaaatgattgtggtattaaatataatttagcaaatggtggtccagctccggaatcagttactaataaaatgtatgaatattcaaaatcaattacttcatataaattaattaaattagatgaaattgatataaattcaattggattgaaaaattatggtcctctggaaatcgaaattattgattcaactaaagattatgttgaaatggttaaatctatctttgattttgaattaattaaatcttttattaataataccccaactttttcatttttattcgattcacttaatggtgttacaggtccttatggtaaggcaattttcattgatgaattaaatttaccattaaattgtattcaaaattataaaccattagaagattttggtggattacatccagatccaaatttaacttatgctaaaacattagttgaaaaagttgatgaaaataaaatagctttcggtgcagcttctgatggtgatggtgatagaaatatgatttatggttataattcatttgtttcacctggtgattcagttgcaattattgcagaatatgctaattgtataccatattttgcacaaaatggtgtttatggtttagctagatcaatgccaacttcaaatgcaattgatttagttgcaaaggataaaaatttaaatgtttatgaagttccaactggatggaaatttttttgtgcattatttgattcaaaaaaattatcaatttgtggtgaagaatcttttggtacaggttcaaatcatattagagaaaaggatggtttatgggcaattttagcttggttaaatataattgcttattttgcaaaatcaaatccaaatgttgaaccaacaattggtaatattcaacaaaaattttgggaaaaatatggtagaacatattttactagatatgattatgaaaatattgattcatctaaggctgcattagttattgataatttaaaaaaatatattaatgattcaagttttattaattctaaattaggttcatcaattgttactgaggcagatgatttctcatatactgatttagatggttcaatttctaaaaatcaaggtttatatgttaaaagatctgatggtagtagatttgttgttagattatcaggtactggatcatcaggtgcaacaattagactttatgttgaaaaacatagtaatgaatcatcattagaaactcaaatttatttaaaggatataattagtgaaattgttgaatttttaaaattaaaggaatttattggtacttcagaacctgatgttaagacttaaatttttttctttgagtttatttttacttctttattatattatatattatataaaacaaatttttatctaagttgtccataatcttgcattaccatcagcaccagcggagaataaccaagcttctcttggatgccaaataatatccaatacacctaatgaattaattactttatgaccttgtaatttctttaatggaactaataaaggatttgtaattaaatcatcataaacagttgcatggaaaacatgtatactaccatcatctgaagctgatgcaaataatggtaatgaacctttatgaaatgaaactgatctaactgccttttcatgatatcttaaagttttataaggagttgaagataattctaaatcatgccataaaactcttttatcatatgaacctgcaattaaatgttcaccaccctttggatgaatatctaaacatgataaccatcttgcacctggtaataattttttaactaattgttgtaattgtaaattatagatacgtatataacgttgtgacataacaattaaaattggctttgttggatgaaattttgcatccattaaaatacctctacttttcctaaatggtgattgtgatgcatgttttgataattgatgaattaaaacacttgctttattaccaccatctggtgaaactgataataaataatcaccacgacgatgccagtttaattttttaattgttgatgatgatgttgattgtcccttacctcttgatgttgtaataattaatgaaataccattaatttgttgatctttagttggttttaaccaagttgcagaattagtatttgtagattcagattcttcttcttcattttcttcattttcttcattttcttcaccatcaatattatttatattagttttatcattttgagttttaacaaatccaaaaccattttcaattcttttatgaccttcattttcaatttcataaccgaaaaattggtggtatacaaagataaatattttcaccaactgaaattgctaaaataccacaagttgaatctggattccattcaactgattcaatatgatcttcattatcttcaatatcttcaattaaagtaattttgaaaacttctctacctgttaaaacttcccaaattctaacagtaccatcatcagaacctgttgctaaccaattaccagttggatcaattgaaattgaacgaattttacctgtatgaccttcataaattgttgaagttttaattggaaatggtcttaaatcttttggtgatggtaattcaggaattaaactttcaggatcaatatttaatttatttttacgtactcttggtgcaagataaagatctaaacatctttcaaatctttcacgtaaattattttcataacctggaactttacgtaaagaattaaacttttgtggaataaaatttgtttcacgttcactttcatctttattcttccaatcatttaattcttcctctgtgaaaacatattcctctggtggattataagattcttcattagttggaggtggtaattttggtgctcttaaagtcattatatgatcttttgaaatttcatcatttataccttcccataaatcataatttaattcattttgattttcatcatcaatttttttacgatcatttggtgataaaattttaccttccctaattgctttaactaatttcataattcttctagcttcatgtttagatggtgtaaatctactctttggttcaggagctgcagataatggcataatttcagttttacttgtaaaccattgaattgttggttcataaggatttgtaaattcatcagtattttcatttctttcaattttattaattaattctaattcttcttcacttatattaagtgaattacctgaatttttatctaataaacctgtccatccttctggtaaatcaatactttctaaaagttgatctaatgcactacctttagcaggacgcataattcttttaccattaagatcataaccaatatgaggatattcatcataagctgaaattggaatattaccaatagtattaacttcttcatgatcagaatcatcagaatcatatacaggttcaatttcaggtttaataattctttcacgtccatctgaaaattttgtttgaatttcatttaatttattaactgaattatctgataatgtacgtaatttaacttttgaaagtctttcatttaatgaagttgtatcattttcatcatcatcttcctctgcagaagaagaaatttcaccttcactatcttcctcacctaataattcattgaattcatcatcagaatcttcattatcatcgttattatcactatcatcatcatcatcaccatcctctgtattaatcaatccatttaattcgaattcttcttcctcactctcatcatgttcatcataacttcttttccctgtcttttcaacagccttagaacccatattcttatcgttattctagtaaattaaggcaaagaatacagacaaacttcttttacagttacaaaaatttttcaacattaataaaaattaacatgaaaaataaaatttttttaatcttcccaaaatacacagccttataaaaaataaaatactaacctctattattatattattattataccccccagatgataactttaccatcatctgaaccacttgcccagtgaatacccctagattcatcgaaataatcatcacctctccaatcaacacaattaactaatccatcatgtgcctttaaacaatgtaatacattaccttcattaccccataaccaaatttcaccattttgtccaccaccactaattacaatacttgaatgataattataattattcatttgaggattataatcaccacctgcacaaccacgtaatacataattatttgaagatgaatttggtaaataataaaaagtttcaatatatggtaaattatcattagttgaatccatcatacttgaagtattaatcattattaattgatttggttttaaattaattaaaatatatgaattatttgaattaatacctgaaaatgattttgaaactgatgaaattgatattggttgttgattaaattgtaatttataaattaattttaaattatctaatgtgaaaacaattaattcatttgttaaagtaattgcataaataaaattattttgaattgtaaaatcttgaatttgaggtgaaataattgatttatttgaattaaattgtaaaattatatttggtttaattaatttatcttcaaataattgaattttaaataatttaccatcatttgatgcaattataatttcattattaatttcataatttgaatgaaattttgcacatgataatcttgaatcaatcattattgatctataatctaattctttaatacatttattattattaattgaccaaattcttaaaatttgatcaaatgataatgataaaagttcagttgatgatgaattccatgaaagataagtaattgcctctgaatgtaatttgaaaacattaattaatttatattcatttaatgtatcgaaaatcattatctttttatcccttgaacctgttgctaaataattaccatttggtgaatatttaataaaccaaacttcatcattatgataattaattttaaaatattcattaattggtaatgaatttggtttaaattttggtaatagtaaattttcataatttttagctttattaagtttatcttgtaattcatttggattaagataaatattatttggtaataataatttaaataaattttcaactaataataatcttgattgtgttaaattattaatatttttccaattaattgatgataaataagtatttggagtattatttgaagaagatagcagtaatgaagataaattttgtctaattgataaatcagtatcaagtggcaaagaatttaatatttgtaaagcatttgttgaatttttagcaataattaattcctctaagaatttaaatgttatgattgatatccttacatttgaagataattcctgagatgatgaagaagatgatgatgatagtgatgatagctttgatactataagttggaaagtctcctctgatattaataaatcatttattaataaattagtaatttcatattttacctttagataatgtttatcagctttatcaaagtccggtaagttgactatttgattagctatatctgaatgattattctgatagagatactgtgcaattagagtaagtgtgttcattatttcaagaagaagtgataagttaataattacattacagtctatataatgagatgaaaccacaaagcgaaatgtcaatgcagtgagttaaagcaaagacatattataaagcggttaagttgatctcctgccagccatttttatagtcactcgatagagacagtacaaggaccactggtattccggcagtgtgtaatatgtatgttaaaagagagaatattgattaagatatccataataagagcagtgtgtctttcttttatactgcaatttttttcattgagggttcttcctatattaagggttttatataaggtatatttaagctgtagtacttcttttggtaaggatgtctacagttacgtttgttacaggtaatgccaataagttgagagaggtggtacagatcttatgtgatggtcaaatagagggtgcaactattggtaaatacaccattaccaatgcaaaaattgacttggatgaaattcaaggtagtatagaggaagttactaaacataaaactgaacaagcagctgcaattgttaatggacctgtacttgttgaggatacttgtcttggatttaacgcttataataatttacctggcccatatattaaatggtttgttaaaagtattggtttagatggattagttaaaatgcttaatggatttgacgataaatccgctaatgccgttacaacatttggattctgtgaaggtccaggttgtgaagttgtattatttcaaggtgtcacggagggtgttattgtggaatcatgtggtccaactgattttggttgggattctatttttaaacctaatggatttgaaacaacttatgctcaaatgaagggtgatgcaaagaataaaattagtcaaagatctaaagctttaattaaagttaaagagtattttaataaataaatagttgagtagatgtaaataagtaaataagtaaataagtaaataaggtataaaaattgtgttagaaaaaagaactttatggtataatattatatgtttagtaaattagtgaaaaaatcttgaaataactacttttaatatgaaacaaataagtagtgttaataaagctaataaaatataataacctttagtaattaaatgataagtgaaagtaccattaatagtttctaaattatgattttcaatttctttaataccatcagtaactttttggaaaatgtattttgattcattaataatttcaattttttcctcttctgaaaggaaatttctagtttgtaattcataatctctcttgtaaacaatacgtaaagtttccatatcttcaacatcaaatttataaaaattagtaccttgattaataaattcttcataagaattattttcaattttcggatataaacttaaagattttgcaacttgtgaactcataattctaccacctgcaaataatgcaagatataagacatgcatataagctagtaaaaggtaaggatgatcagaagttgattttttaatataatcagtaaattctatttgaccttttaaaattggattttcaaaatgttcactcttatcatgataataatacattaaatcagtaaataatttttcagttcttaacatttcaggtttataaatattttgaaacatttcagtatatttattattactctttaattctctatctagtgcaatttcaacagctttgaaaatatgataaaacatttgaataccttgtctataaattttataatttttaattgcaatggcaaattttaatgtaactaatttatctacattattatgtagacttctagtttccatattgattctattagccaaagcgccaatatcgtttttggcaggaatgatttcttgttggttgatttgtgtattagcgtacatgtcttgtagaaagaagtaaataaaagacttaaaagaagtaaataaacatcacgtaaagaccaaagccttcacttctatttatttacccgctttttctctcagcgctttcagctttttcaattttttcagcttttcttccattttccactgcttggaaggtcttgttataggacattagttagacattagacaatgaccacaccggtaattagatcatccctcgtcttgtcgagaatacccatcgtcactcctgatgtgcctgcctttgagaaagctttttaccagtatcaggaacaactggagagaagacttatgtggacattcccaaaatggtattatttcaagaaaggtactgttgcagagagagaattctctaaagcacaaaaatatccaattccaaatcacagaaatgtttggtttcctaaaggtgtccctgatttaaaacatggtagagatagaagatttaaacaagatattatccttccaaagaaaaataatgatattgaagttagtaacaatgatggtgaatctgctgcaagtgaactacaaaatttagatgatattggtagaccaattaaggctaattctagaatcaccattttcgatgaaaaaaatgatcaaacttcacttgaaaggaaattaccaagaactctttacttattaataaaaaataataataataatgaatggactttcccatcatttgaagtttcaaatgatcaaattaataaaggtttacataatattgcagaggaaggattgagaaatattggtggtgataaaattaatacttggactgtatcaaatactcctgctgcattaattaaacataataatggtattaatgaatttttaattaaatctcatataattgcaggtaaattcaatccaactaataaaaatgaatacaaatggcttacaaaggaagaaatccaagacatagtaagtgatgattactactctaagatcaaccatttactctcccaatagataacctatcgtatataattcttactctctgtaaatactgaataaaatgaaaatttaaaaatttataaaatttccctctcctcgcaggctcagtcaatttaatgttatctatcagctgagcatttccttctttcttttatggttattcctccttttcaacattcaatgagctctgttgtagagtcagagaagtcctctagtgactatgttgctgagagattggttagattggtttctgttggtttaaaagaagctacaatggattctccaagttttagagcttcaattaatttcactcatatctcaattttacaatgtaatcatcatttagaacaatcattaataattttaagaaattatatgattaatttaaataatttcataaattcaaataatgatataactaatttatttaaaccttatattaatgatttacaatttattaataatgatgtatcaaaaccttgtattaataaatttttaaatggtcaagatttaatttttaaacatattttaacaattttatcaattaatgaaaattcaattaatttaattaatcaattattagatattgaattaacaaattattttattttacgtaaaaattttgaaaatattcaaaataaatatgatattgttttagctatatttatgcaattaccaaaaggttatgattcaaataaatcaagagaggatgctttacaattattcgaaattaggaaacaatatattaatatttcaatgacattatggataattattaaacaattagaaaataaaataagtaaagtagtaactgaaatttcaaattctttttggaataatgataatactactagccctatagataatacagaattatatgatgcaattggattaagtgatattatatattcaatcaaacaattaaatttatatgctgatttacaatcaaattcaaataatttacttataaatgatttaaatcgtgcaagacaaaattcagaagaaggtgcaattaaaatgtatacaccaagttcagatttaaaagattttgattcttcaactttaaatgatgataatattttacttaataataataattcattattagagaaacatggttgggttttcattaaatcacaaaaattaaattcaaagggtgaagtttggattaaacgttggatgtttattaaaaatggagttttcggtttcctgtcaatttctcaagatggtcaatatgttcaagaaagtgataaaattggtgttttattaattaatattaaatatttaccaagtgaagatagaaaattttgttttaaaattgaaagtgatttaacaaatttaaatattcaagttgaaacaattaatgatttaaaatcttggttaacagttttcaataataatcaaattttagcaaaggatgaaaataatttattagcaactaaaagatatccacctcctctaaatttacttaaattacaaccagttgttgcaaaagatttagaattaattaatgttttaccaatggattcaactattgaaaaaactcaaaaattaattgaaatacaattatcaaattctaaatttaatttatcaattaatccacctctgaaaacaagtatgactgaaaaattatcaatgtctcatctgtatttatcttcaactataataccttcagcaacaactgctaatttttgggggtacgttaattgggggttatattttgtaattgatgatgaacataaagaaaaaattttatcatcaaataaaaatattgaaccaaaaatattaattaatctaagatatccaaaattttatccagaaaatttaagagttgcagatgctgaattaagatcaattttcgaagttttcgttaatgataataatgaatatactttattaagatttaatgcttcttggtcaccaaattcagatcaaacattattttgtacaatttatttaacaaatcatgcatattatgtttatagtcatacatgtggattaatctctatgttaccaattcctttatcaagtgttttagatgttgaaattttgaaaaaaggtgaaaaaaatatattgaaaatttttttcgttaatggattatcattaaaaatgcaattatttgctgataatgttgaaattgttaaaaataaaattaattatattttagataataataaatctaataatcccgatagtttcaatttagttattaataaattacaaaaaattgaagaaaatgaactaaaatttaaattaaattcaaattccaaattcatatctaaatttaaatcaattgataatgaattaattaatgaaagtattgatgaaattaaaggtattaattcaactattcaattatcaaataatactaatgaaaccagaattttgagtgatatggatattgaaaggaaaattaattatacacctgaaatgcatttattattaattaaaaaaattaaattaccttccaaagcattatttcatatgttatttggtgatgaatcaattttattacaaggtactctgccattagcttcaagtatttttaaagatgatcatctgaaacatagtttatggagatgtaattctaaacaaaaattatcaagagttgtttggaattcaattttcaaagtaccatgtgcattacaaacaattgaaagaattgataataataaatattataatattgttcaagaaactccatatttaagatttgttttcggtattaatagaaaaattataatgagatttataatttataatgttgattctaaaacaagtaaattaatgatttattataatttaggtgatgaaaattcaaatgtacttaattggtttacaaggaaagttactcatcaaattatgttatttagaattgaagcattagagaaaaaattagatgaatcaattagacaaataattaatagtaataaaaaaatatcaatggcaattcaattatttggaccaattactaaatatgatagtgatgaaatgactaaagaggaaggattatttgaaaaatctgtttattttgttccattacaattattttcaacattttattgtgaaaagttgaattttgaatttgaaaggtttatagtttattcaattacgactattaagagaagtattaaattgtttttcaaatttattaatgcaaatttaatactattctctgttttcttcttttcaataatattaaattttattttaattggtaaatcaagtacttcatattggagagagaaaaatattaataatcatctcagacaaataacaggagataattatttaatggaaagatcaattggaataagagaaattgatgaaatgatttatccaaatagtactgatttatcattttcaaatgaaggtagtgaagtttattggaaatttttaaaacaggaaaatttactttatattaatgaattttctaaaattgatggaagtaaatataatgataaatatgatattttaagaggtgaaagggaaattctattatcacaaaaattaacaggtttaagaatggaaaggaatgaaattttatcaaaattaaatttacttaattatttagagagagaatttattattaaagaatggactaattgggttagttcagaaatttccaattgtgaaagagttaaagaattttatcctgaatcatttgaaagtattaaagattattgtaatgaaactgagacggaaatgaaacacttataccaaacattattatgaatataatatatagaaataatataacattttctatttgtaaacttatatattatatattataatactaacgattaaaatccattagatgctaaattatccattacactaagataaaaatattttggattaaaattaggtactcccatagctaatttaaccattttcattggtcccatccaattaattaaatctgcatgatccacatcatccaaataaccaataaatttcccccatttacatgaagataaactaactaaaccatcattatcaccttcattatcataaactattttccaagttataagaaacattgaagcaggatttggtgtaaatgttgcaccataactaaaatatcgtacatttggatcatctttaactaaattattaaaatttttcatataacttgtagttaattggaaaattgatgggaaataattagttattattgaagttggagtataattcattgcaaaatctgcagctgatgtacctctatgaggtgttgaaatagttgttaatgaaacaatttgatatggtaatgttgtagttttcaatataatatttgaatcattatttgaatcgttatttgaatttggttttatattatgtataattttcctattatttaataaatgaattaaatatcgacaatctaatccacccattgaatgtgcaactaaattaattttaacgggttgatcattaggtacattatttgatttccttaatttaggtacagattttaaaataaaattatgtaatgctaaagctcttgtttcaatacctgcaaatggtggtactttagcaaccagtattgtacaaccttttgatttaagatgttcacgcacaccattccaatattctactaaatatttagtatttgaagcagtgtctgcatctaaatctaacattgatctattatcaatacttgaagcaattggcttttgtatctgattctctttattggattgtaataattccttaaatttatcagttaatggtatagttgaagatggattgaaggcaggtaacgcaaataaatgatcaaaacctgaaaatccatgacataatatgacaggatatttgggtatcttagcagaagttaaaggtgcagagaaggagagcattgatataataaagaaaaaggaaagaagaaacgagtatataatgaacttataacctggcccagataagttatcaatcacaacttcctaaataggcaattaccgagcccccagtaaaatcgccatcgaaaaaacatgtagtgagccaaccagccaatgaaacgcgagaatggcataatgggcccgagattgaaaatggcagaagaatccacgacaagcaaattgtgacgggtgaaaaaaaaatttgagtgggaacgaggaagcgggcacgcccctgcagcgacagtgggaaagttggtgggtcagaaaacgcgaatggtgggacagaatttcattggttattgaggtggcagctgaatgagcgaattgagtggccaattcttcagtttccattttttatagtggtagaatcaccattttacttcttttcaacatatttctactacattttactttattttgctctaatattggttcatttattctattaaattcttactttcatacacaacaatgatttccgcaagaaccatcagagctgctgctaagcaagccttagctgtcaacgctaaagttatcccaagagttgtatgtattatattatattatattatattagattgtcatttcaattttaataaatcagtcaattattaagatcattcatactaacataaattattattcttattattattttccaatacaggcaagaccattagctgcaagatcctacgcatccgcaaaggctgcaccaactgaagtttcctcaatcttagaatcaaagattagaggtgtttctgaagaagctaacttagatgaaaccggaagagttttagctgttgggtacgtataatttccttattattcattacttatcaattgatttaatatatctatcaatccaatatgatgatgatatattatttaatataattataattataatattacaattgatttgcaattaatgtcattttcattactactattcattctcataaatacttataactatacttattgttaacatcatctatcataatgttcatatacataactattcattgactatataccattcattattttttattcacaagtttgtcaaaaatttcaagaaattccacaaattcgagaaatgagaaaattccaaatttcaatttccacccaccagcgaatcaaatttcacctttcattcttaacggtgttaacaatacttataattacaacgtatttgtattaatgatagtagtagatatctcatattcttattatcattttcatgaacattcatactaacatattttatctcccttaaaattttattttaatatagtgatggtattgctagagtttttggtttaaacaactgtcaagctgaagaattagttgaattcgcttcaggtgttaaaggtatggctttaaatttagaaccaggtcaagttggtattgtccttttcggttctgatagagaagttaaggaaggtgaaattgttaagagaaccggtaagattgttgatgttccagttggtccagcaatgttaggtagagttgtcgatgctttaggtaacccaattgatggtaaaggaccaatcgctgctgttggtacctcaagagctcaattaaaggctccaggtattttaccaagaacttctgtttttgaaccaatgcaaactggtttaaaggctgttgatgctttagtcccaattggtagaggtcaaagagaattaattattggtgatagacaaaccggtaaaaccgctgttgctttagataccatcttaaaccaaaagagatggaacgatggtcaagatgaatccaaaaaattatattgtgtttatgttgctgttggtcaaaagagatctactgttgctcaattagttcaaactttagaacaacatgatgctatgaaatataccattattgttgctgcaactgcatctgaagctgctccattacaatatttagcacctttcactgcttgtgcaatttctgaatggttcagagataatgctaaacatgctttaattatctatgatgatttatctaaacaagctgttgcgtacagacaattatcattattattaagaagacctccaggaagagaagcttaccctggtgatgttttctacttacattctagattattagaaagagctgcaaagatgtccaatgctaatggtggtggttctttaactgctttaccagttattgaaactcaaggtggtgatgtctctgcttatattccaaccaatgttatttccattactgatggtcaaattttcttagaagctgaattattctacaagggtattagaccagctattaatgtcggtttatccgtttccagagttggttctgctgctcaagttaaagcaatgaaacaagttgcaggttccttaaaacttttcttagctcaatatagagaagtcgcagctttcgcacaattcggttccgatttagatgcttcaactaaacaaactttaaccagaggtgaaagattaactcaattattaaagcaaaaacaatactccccattatctgctgaagaacaagttccagttatttacgctggtgttaacggttacttagataaattaccattagataagattgcagcttttgaaactgaattcttagcttacttaaaggctaatgaaactgaaatcttagatgcaattaagactaagggtcaattaactaacgaattattagcaaaattaaagtctgctactgaatctttcgttgcaaccttctaaatttaattcctctttaagcatttaaatgaattaaataatacgacagagaaaaaacattttagtatatttttcacattatttattccatatttatatttatatttattttatgatgaaatgataagaaattgaatctttttgttttgaaaaattatttcataaatcataaaattattatattattatttatttttattttatctttataatatacttttttagaaccttaagatccattttatttattaattaagtctaatattcaatttattatttaaacttgtaatctttttactttttttaaaaaaccaaaagtagcaattttcacgttacatgattttgtcatgagaaattattcagtattatttaatttgaaatttgccatttcttaaatgttaagttaacattctacatattaatctagatacttatcattcaacaaatgtcagaagaaataccattaactccacaattacacggtgtcgctgatgacttacccgtgcgaattactaatgatgaaatgtataggagatcatcccaatatagatattggtcattcactaaggaatcattaacagatctacgaattaaagtcaataacaagggtaaaactatttttgaaaaacgtattttataatctcgatgatgatagtgatatgcttattaaaaaatatataacagagaatgaattcaagggtattaattgttcagaagaaagagagattgttatttattatgcacgtaaatgtcaagatttatctaattttttcaaatttacaacacaagttagattaactgcaatttcattccttttcaaattttatttagttcattcagtaatggaatattatccacaacaaataatgtatacatgtttattcttaagtgcaaaaagtgaaaataattttattggtataaaaaattttagtaatgcaattccaaagacaacagttgaaagtattttacaatatgaatatttaattttagaaacaatgagatttacacttacttgtcatcatccaatgaattcattatatggatttttcttagatattcaaaatattttagttaaattagattttaatagattatcaaaagattatgatacatcacgaaagataattaatgaaagtgttttcacggatgctcaattcttatttactcctccacaaattgcactagctgcattatatattgctgatgatgttgtttgtatgagatatttaatgagaaagtttggtgttaaaagaagacaaatgttacaacaaatggaacaaaatgaaaatgagaaagaaaaagtaatggtaaagcaagaagatggaattaatgtggatgatagtgtaactgtgaaacaagaaaaagatacagaagaggaaaatgttactgttgttggtgacaataagacagtggaaggtacacccgttgatgtaaagcctggcatcaaattggaaccagaaagtccatcagaaactccaccaactgataccgttgaaaccacggctacagttaaatcaacagatgagaagaatgttgatgatattgatgaatctattaaattagttgatgacaaagatgaagaaaagcaagaagttattgaagagacaccaattgaaaaatatgaaaggattttgaatatagttaaacagtgtgctgcagagatacaaaataagattgatccaactgttgaaagagctaagatcgtatctcttaaggcacatttttgtttagatcctgttaaatattttaaaaaaatatcaaaggataaaccagtagttggtaatagtaattcaatttcaccggattctactaccactttatcaacaacatcagttaaaagagaagctcctgatgatgaatcaaataatttagatactaaaaggattaaacttgagtcatagatttagtttatagtttatataaatttttttttataattgtatcatatagtttacacagagacattatttagataattttaggtatagcagttatcttatccttaataccaccaacgtgataacagtatttattctttgaatctatcagtacgacttcttgaacaaaatcacttgaaccacctcttaaaatttcaaatttaactttaccaattttcattgtcattttacctgatttatggatttgtattttaccaattttaccattttctccaccttctaatataggtaatgaacatgggaattgcataaagaataaattattatttgaattattcttcatatctaaacttttcaaacttttacttaaattaataaaatcatcttgagtttgtttaatttcttgcttttcttgataatcattcatatgtaaaccatcatcattttcattagtactatttggatgaatattaatatcacctaacattaattcaggagtttgagatctagatttagaatctaaaccaacagtattctctcttgttacaggttcacttggaattgttgaacctgcattatgaaattctgtctttattgtcttatcagttttaatttcttcaccatattctcgatgttcatttctttctgctctaacagggaacagatcagtatctaattgatctatttctacatcattttcattattttcaagaattgtctttttactcatatcaattgcattatcatctaaatctgaatctgaatctgaattataattaccaaatgcattagttttaccattttcttcctttttaattttagatttatccttatttttggattttaatctctctaataatggattaaatgcacctgcaccgggacttgatgaacgcatattattaccactattacctaatgatattgtaccttcacttaaaggacctgatataactaattgagttcctgataattttttatttgttttattaccaggtccatttttcttatttgctaatcttttactattcttttcagctaatttattaacacctggtgtattaatctttgatgtattttctctttcttcctttgatttacgtgagacaacctttggtttgaatttaagtgctggtttcacaccagttggagttgtacctgtacctgtacctgttgctgtgtttggtcttgtaatactatccaatcgttttgacattgtttatttatgtatgagaaggggatatattgttaaaaaaaaggcccaaaacaatctgatggaaagattaatgcagatactaagatcggttcaactgaaaaaaatatttaatttttcatgcaaaattttttttcaggttttccatactaaaaagttgttaaacttttgtttatttgttggtttgttttagctagttagttaatttcaagtagcaaagataaatatatcgatatggcaagaaagggtaagaagataacaaaggaagttgaagaagattatggattagatgaagttgatgcatttgcaaaggaaagaaatgatgaattatatgaaaaggcaggattaaatgataaaaccaatgaattaagttccgattctgatgatgaagaggcaattgaaggtgttatggatattgattcagatgttgagattgaaaaatataaaaagaaatttacgggaccaattgatgaatccgatgaagaatattttaaagatgtgaatgaagatgaagatggtgaaggtgatgaagatgaaactactagaaaaggttggggaggtaattattatggtgcagatgaagcagaggatgacgaggatgagaaattaatggaacaggaagctttacgattacagaaaaaacatatggaagatttacatatggaagattttatgttagacgaaactgaagactggaaaagtgaaagtaataaaaagaaagaaggacaaaaaattgaaagtgaaattgaagttaaagataaattcaatgaaataacaaaaatgggtgataaaaattcaagaatggaagcaataagtaaaagatatccagaatatttaccattagttttagagacaaagaaattacaaccattatatgaggaattaaaggaaaatcatgaggatgcattagccaaagtacaatttaaggcattaagtttatatttaggatcaattgtttcatattttagtgttttcgttaataaattagcagctgatgaaccatttgaaatgaaggatgaagatgttatgttatctattttaagtaccagagagttatggagacaagcaagtacattagttgaaggagaagaaggagatgaagatgaagaggtagaagaaggagaagaagaagaagaagaagaagtagaaatcgaagaagaacaagattctgaagaagttagtgaagatgaagtatgaagatgaagattctgaacaagaagaagcagaagaagatgaagaagactcagatattgaagataattctactccagactttggagaacttcgtagccttagaacacaaacttccaaacaacttgaagatatggatgatattgatattgaagataagaaagtccgtcgtaagaacttacgtttctacacttctaagattgataaacgtgaagcaggtcgtaagacagtagatggtgatcaagatgcatattacgaggaacaaaatgatccaaagaacaagaaacctgtattttcctccagagacagaaggctccaagagaaactgaccgtaggtccaagtccaattccagaggtagatccagaagatagtattgtttgtagtgtataacacatttataaagaacttaaaagacacttaaaagacacttaattaataagagaaccttccgaaaagggaaatttcagctgcatgaaaaaaattttttattttttaaatttttcactactatatagtatttcttcaattaatattataacttagttatttctttctaacatatctatagacaatgtccgttgaagaagaaagaaaaccagtcactgttgataaggagattccaatattcctatgatcttggattactcgcagcttacgatcctcaacctttagatcatttaaaagtttcagattctaataagagagaacaatatttaaaagatattacaagagataatgtacaattacttgttaatcaaattctttctctaccattacaaaagaaagatactatcacccttgtaacgcttccctgaaccaattgttaaacttccaagagaaaaatcaattccaaaggctaaagaacttacaagatgggagaaatttgctgcaaagaaaggtatacataagaaaggtaaagaaggtaaacttgtatttgatgaagaaactcaaaaatgggttaataaatggggttataaaggtattaataaaaaacttgatgatcaatgggctgttgaagttccttcatcatctgataaaactaatgatcctgaagctttacttgatccaagaaaacttcatagagatgaaagaaagaaacttcttaaaagaaatcaagctcaacaaaagagaaacagggaatctaaataattgttttataatgtttaattggtaaatataaaaaaaaattcgtatctgtattaatatcatgtaagactgtgattaaaatctacttgtatattaatattatactgtattattatatattatacttgattcaaagtggaaaattaatggtatctatacttagaagtttgttacaactaactatatttaaataattttttattttcaattttctttacttctatctatctctttctttcttttcgtatatatatgaatcgataaccatgtcagatgcatatgacatgatgattgattcattgattcaatccactgaggaggagaaaacttgaaacaatgaaatctaaagaaatagtattacaacttcaaggattcttaaatatacaatttaatgatgaacaaatgcattatttgaaaagaaaagttcatcgtaaaatacgacattatttacaacaatgtaaaagagaacatgaacttattgaagaggctaacaaacaatctatagatgatctattattcccactcataagtgctaaaatcttctataaaatatggatagaattactatataacaataatattggaacatttgagaaagagattatctctgattctctacaggaagtgaaagaaacgaaaactaaacgaaataccatccctcaaccatcaatacaaccacaatatgaacctagacatggaatggtaaggaaacttctaagagataatatgtcacttttaacatctattgatcatcatcttgatataagtaattataatatatcaaataaagaacaaagacaaataagtgaaaccagttttcaaaagacgtaagaagtatttccaagagcaagagttacaagaacaaatcaaaagatctacaactgttacgaatcgtgtaatgtataactgggataaagacatgcaggagtttttaaatatttattctccacttactataggtgaagttttccatatggtatggagatatatccattatttaagaagaatgaataatggtaaattaatacctgattctagaatggaattcttctttaaagataaagattgtcaaaaattaactagaaatgattatttcggtttagttgctaaacatagactggaaactgaaggatttgttcaatatgatggattaagatttgacagtgatggttcattgattcctgtggagaagtacaatatctcatctgagaagttaaatgaagcaattgaaaaggctaagaaagatatgaatgttccaaaagaatttacctaagatgttaaaatttaaagatagaataaagaaaaggagagttatcaataaagttgacaatgatactccatctgagagtgaacagttgtaatgtatagtattattatatctgtatctgtatatcgatgtaaataaagcaatgtattatatatatatatatagccttttgtgatgacatgatatttttcagtctgttatatactaagatgagaaatttcaatgtttattcatcataactttcttttctgtttgaattggaataccacaaaggaaatgcagtttattggtactgcatttgaagactatgtcttggaccagtttttgaaagttcaattattatttgatgaatcttacaaatatgttaaagtatcacaaattaatggaattccacaatcacctgttattgcaaatacgagtaaatcaatgtttcataaaagcagttcattgatgaaaagtttaatggaaaatttgaatgaactgtcaaatattactcaaatcgatatgtcatctgagtttaaaaagaatataataaagttcttgtcaatacataaagcaaattttaaaaactttacaattgatacgttaaattctgaatttcaaagttttttgaaaaatcaaaaaggtttaagtacaactgatcctcaattttatattcaaagtattcaattagttgatttattgcttatttgtaaatcatcaagtaatgaaaaaaatcagttgattaagattagaaattcattattagattgttcttatttacaattacctactataacggatgaaaaatttaagacttctatatgtcagtcttttaacataacaaaggagcgaattaattactaagattaatacattaaacactgttatttctaaatcacaaattgtaaatttcttccaatctggtgatgttctatcaaatacttatactattaatgattttgaaaatccagaatattatgagaactggttactaaaatctagaaatttagagaatgatatgattacattatttactgatccaacaataccttctaaaaacacaaatatctctatcgttcctaatcaattaagtgatacaatttcccttttggtagctatttcacttaattcaaattcttcattttttcatggtttgatcaaatgcatgcaaatatggcaaataaatcctttctatattcagtttaagtttattgaaactgctgttagtattagtaaagaacagaatgatgataagattaatccagaattagttgaaaaagcctttaatttatcatatttagcaatgccatttcaagtacaatttattgaatggcctttaaatgaaaagaaaaattttatgtcattaagtatgaaaatctataatgaatcagctgaaactatcaaaccttgctttcgaatgtttttccaagatcaaaatacatttactattgctctatcatttttaaaattattaaaattgaatctgaaaaatgtgaaatctgaaattaaagaacaattggtaaatattatacaacaaaggattatcatctcataaggataaagctggaattagtgattatgatcaaaaattaaaattagataatatggttaaatttctaagtttggtttcaagagatatcaatttattatttaattggaaatccaataataaagatcttaatctttcatttcagatatttgaaattggctccaaaattttaatgagtccaactttagagtatatcaaaaaatatgttaatgaattaaagagtaatgatttcaatatagtctctaatagagagaataaagttaatttcggtagttttattgatcttgtaaataatttgaaggcaagaacaaattttaaatatgattttcaaaatgaaatattcgatgatttctacaaaatagttcaatcatgggataatgaaatgttaagtaaaaccaaaaatattatatctagtgataatcttgtaagattggatggttgttcatattcttcaagtgttcaaaacttgatacttctgtttgaaggttatatcaagttattagacagtttcaaatggagtaatgagcttcaatcttcagaacttaacattcttttatataaaataatgattaactcaatcaaatattatcacagttcaatgattaagaaactcattgaactaaatggtttacaaaaagataataaatcaattgactcatttgtttgtttgaataatatttacaatttattcctctttgttgaagaacttcctaaaaatgaaaatgttttgaaagtttcacaatatttagtgaactaatgggaaaaatgaaaagaaaaattcaaaagtttcgaaataaatatgtctctgtattgattaagaatgcagaaaatattgaagattttagaggtaatccaatgaaccttatggtacgactaagtggactaattaataatgaaactcgtgtagttaataatgattataatcctgattggtttgaagaatttaatgtcatagtttcaggtaatactaaaatcagtagtgattcatcaaagggtggtaaccttaaaattgaagttgttgatgcttcctcgaataacgtttacaaatcagtgttctacaatgttaatttgaatacggaaagtatctttaaaaatcaatcagagaaaatattactgaaaccaaaaagtggatcattgaacatcaatgtaaccgttgaatttgagaaaaatgatcctttattctatattctcatctgtaagaaagaacttgacaattcaatcaagagatgtttgaactatttaattgaaggttatcttgatgatattaaaaaaatattcacattatccaacttacagaaaagtcttattgaaaatccaatcagatctgaaaacgattttaagaagttacaagatccatacctcgatacactaattggtgattttcaagtgaaagttctaccacaagcttataataatttagaaactaaattatttgataaattgattgttgaattctgggagaaaattttaagtattgcagaaaacttattacttccaagactttcacttataaattatatgattaacatgaaactcaataaaaataaacgaaagagtaaaagttcaggtaatacatcttcaatggtatctgcaccatccggcactcacgttagtacatcaaataatcataatcaaatacacgaaactacaagggaggaattgattcgtgtagttgaatggacttataaatttcatgcaatgttagaaattcctgatatgatcctccaagatggattagtacaaccatttgctgattttaatgaaatcaaagcacttttccatcatccattgaaaaaactatgggaaatgtattattttgattggggatattcaagtcatacgatgatgtcacgtctgagtaaaggatcaaactacgatagaagcagatggaccaaggtatcaagacgtaaacaattagttttaagaattatactggctaaaagtactgatcagttacagaaggttaagaaagttttggaaagtgaacaacgttttgaaagaactgttaaaactgaaattgaaattgcatatttacaacaattcctctagttactatttatgaccactatttatttatttatataccatttactgtttactatttactactatttataccattataaaatcacttatatcttgtaaacctaagctcgtatagagtcatgtatatcattacgtaatccaatataataacactctcgtatcagatgatagttctgtttcagcagcaatatatcactctgttttgcaagagattctattaggtcaacagcagatataaatggcagatagtgttcttaaacagaggagaatgtcatccattcctaagctaccggatgacgatatggatgaagtcattacaacaataccagataacgaaaaatctttacctccattaccaggtagtaataaaccaattgatatatcagtaacttctgataattctggtcaagaaggtgatacacgtagtagtataagtgtatcctcttcaattagtaccaaatcttttattaatgggaactctcaaatgaaatcaatgcccgtggtatcagctacaactacaaatgcggttccattaaccgatgactccggactaactaaggatgaagcagatgctgtcaatcttcacttacaccaaattcaaaaagataatatgaaacaggaaaaaatggcaactgatattgataaaaatgaaactggaagatcaggatataatgttggttcatttttacaaaatgttagaaactatggaatttacagatctcaaagtgatcaaagtacaatggaaggggaaacaaatgcggaatgatgcaaatgaaggtttggatgatggtattaaatttgaaaaggataagggtactgaaatgttatcttacagaaaatctagaggtaagaatggcccaacaaatctatctgttaatactgaaaccaattcacctatatcggcttcaaataatggtagtgccacaattatacaacatagaaaaacaagatctataagtacccctcttacggcatcatcacttcaaacagatcctttagtttcacccgcttcatcaattcacatcaccaactgtcaccggaactacaccagttgtattcaataaaacaaatgaagtggattataatctttatgttgatgaaaagtatttggatactcaatacagatatgctacggagaaaagaaatgaagactttcacaatttattttccgatgttccagctgatgatagattacttgatgattttagttgtgccttgagtaaagaaattttattgcaaggaagagtttatatctcagaacattatctttgctttaactctagtttattgggatgggttaccaatcttgttatatcattagatgaaatccaaaaatttgaaagaagatcaactgttggtttatttccaaatggtataatacttgaaacaagagaggcgaaacatatctttgctagttttatatcaagagattcaacgttgaattttattgaaacagtttggtcaaaatccattagtttaagtaaaaagaatcatgaaaaatctagagattttgaatcacttagatccaaatcatcatttgaaggagtcaataataaaggcaaattgctgtcagagagtgatatttacactatagatgacgaagaagaagatgatgatgacaatgattccggtgattattatgatagagatgatgtgaataatgtcacttcaagtgatgaaagttcaaataatttggattcattaaatgagatttctggtgataccaataaaacagaaaagaaacctaagaagagtaaatccaaatcagccaaaaaatatccaggtccatataaacatgaaccttccacttatgtttatgatgaaaaagcaaataacgaaaaaattgttctagataaagaatttgaggctccattgggattagtgtatgacatattttttggagaaaatattgagttccataaaaatatgatgattatgaatgatgggttaaattttacagattatggtggactagcaggagaaggttgcacgagatcatttgaatatgataaatcacttaattttccaattggtccaagttccactcgggttttttgtaccgaagagatgttacattttgatctcaaggattatgttcaagttttgaacataagtaaaactcctaatgttccatctggtactgcatttgattgtagaacaaaatatcactttactttggtcaaaggaaggaaaaactagaattattatcagttttaaacttgaatggaccggaagttcatggtttaaatctgtcattgaaagttctgcgttatccggtcaacaaaaggctgctggtgatgttaacacagaaatgttaaaggttcttcctgcaaaaataattgaatacgatgttcatggtgaagatgaatcagagggagagtcatctcccgtggaggcagaagttgttgacgctgctgtagaaaagccaaagccaaccccaatagcaccagttataaacaaccctatttttgtggaagatttcttggtaaaacagacaatcccaacttctattggtacattcaaaatctcaaatctctataccgctttttcgattgtgataatcatacaattattaatgatcatataccttttgatgattaccatgaatttaagtgtagaggtgaaacaacaaagaaacatcttgtctttattatcggaaaaaatccaatcattggataaatcaattgtttaatttacctgttatgtaatatttaagagtaacaaaattcagtaactatatacttctgtacgataaaatgaatatattaaatcctatttttaaaaaaattatatacaagaacgaataaataagcgtataaacaagcccgttgtcactatacttcgttttaagttgccaaaaattgattattaaaattcatttctttactttccaaaatttccatgttatcaattgtaaaaactgaaatcttttcattatttgcatcaagctcaaatataaacacacctgttaatacccttccaacagatgtatcattactggttgttggatcaaaatttttagctaaaccttcaagagtttgtaatggatttggagatttcaacagtttggtccaatcaaaatgatcaagactgtaagatcctaattttgcatcagtggtatctttatcctgtaaatgtgcacatcctgaataacatgtcctccatttaattttaatttttgttgtgtatttagaaacatcttgagcttgttttggagagccttcaacagctccgttttcatctacgtggccattttcgatcacattttcatctattgataagtttatgagttccgcagatgacattgaattggtcggttcaattattttcaaatttgtgatatgaattttggattcgggattaagataaaacagcaaaacaagtttttgaattgcctttaaagtacttgtatataatacgggtcccttaattgttggtatctgtgggaatttatttggtaatattctcataattatgttctttgacatgaactcacatggtattatcttggttaatagatttggaactttgatttgcaacatttggaccattgttcctagattagcctttctttccaaatatttcttatctatttttggatctttgttatctttatttccttgattattatctgaactattatcactgtaatttagtatatgatttataaatacactatttctttcattcttaacaattgatacagatggtacatttccgataatttgtgatttcctaataaatagaggtttcttctgatttacttgtaccataccttgtatatttttggagtaacttgggataaacattgcatttggaactagttccatgggcgttttgccgtaatctattattgctttttgattaaagttaacttttggaattactaatggtaagttaccatagcttcccgttgttagtttcaccagccccatgtcaaaaaggtttgttttatcagtcgtttgttgctattgaaatggatatacttgttgttctaaaaagaaatgccaccctattcttggaaaggattaatcgattcatgtcctcaacatgaattttgcaatcggtggcgccgcttttatttccgcttttggaaattataaattattcattatctttctattaggttaaaactatacaatttctataatcatttaatcattttatatatatccatattaattttactcaacaacttagtggtatttccaaaatttaaattttgatcatctacacttcctgcctggttcaaaccaaatttacagagaaagttattttttgctaatttttctttatcatgaagttcaatatctaacttgtaaatttgaatagcttcatcgtactttttatcgaatgcatcaatttcaaaaacatcctcattgtcatttgtgtcttttctgaaaaatctgaaagcaagatacagctctgataaatgtctatctctagctatttcatagaaaaatttggcatgttttggtgatctcttttgcattgaaatatatcttgatttataatgttccaactcatcaacttcaaatgtaaaatattttaaatgatataatgctaaataatcagcaattttttccttaaattcctccgagctttcaaaattattcaactcaaatggaatattttttaatgagataaaatttccatatttcttagcggtttctattatctcattatgataatcgttcccataaattactggaagatcttcatcttcaataaaattattcataaattcataatattctttattgaaatcaattatctcgtcttctaaaactttacagtggttattaaatggtaatattttgttatctggcccttcaaaaagttgagtaaaatcaattcttttattatacttttgatgatgacaaaaagcttcccctttgtataattcagtttttacaaattcatcgtactgttcattttcaatatatgacgaagcatcatttgaatcatacaagtctactatttccaccacgggttcataatcaaagattgaagtacaagtgtctttctcgagaatatttccatcatcttcaaccacttcaaacaagccaatagcaaattcaaacaatgcacggttattgctatccaaaggcgtttcagaagaatcaattgcatcacaagaattaaacacttcattctcaataggggatggtacattatcaactgaagatgtttttccactattttctgcattgtcaaaaataggaggtgatgaattgattatttctggaacaatatattcactagattctaaggaaatattggaaattttacctgaatcacttgcttccaacttctccttcataataggtgataaattaatcattgttggacttgcattattcttagtttttgctttgagtgttgaacttggaaaaagatctaagataccaacgttttttgtaaaaacatcggctgagtttgatttccatgtttcctttacctcttgaactaaaaagttgtgagcatatgttaaattgatagtattttcaaggatgttatctgtttcagtaggtaatgctttttttgaaacatttatcacatgatcagtaacttcctttgttgaaatttcagcagaatagattaattttggagattcatcttcgattggagattcaaatgtatcatgcgattctacaaagatttcctcaactttttcagtatcattttcttgtccattggcattttcattttcagtaatagttgaatcagataaaattttttttgaagttgtctctttaatttagatttaagtttctctatttgcaatctagtaaaagtattataatccaatgagctttgtgtaacaatagcgtatttttcaaaatctgactgggatatttgtggtttgacaaatatcttcatgtagctcttgataactttattccttaagcctttttcacaattaaaatcccacccttttctaattattttaccatcaagctcatatacacaattctctaatttaaattcattaccaaatatttcatttatgaaatgatagaaacctatttgaacgttattaagattaatataatcaaaacaatctagaagccagtcttccgtataaaaatagctatgaattttaacaaatttcttgttgatttgagtaattctagctaagtaaattattatttctgatggattaatatatttattcctgcccataaaatttatagtaaaatttggcattctaaattcgatttcactaccaattgatatttgaatatcttcatcattaaattctgcaaaatgatcagcatctgtaatcaattcaatagataaaggttcagcattatctttcaacatactacttaaacaattcaatgcagtattctccggattaattatataagatacaacttcacgtctatttgataaatccatttgtgctctatataatggagatggaaccattccattttgaccagtaattaagaaataaacaaattcagtatatgttgtaaaaccaggtaattgatgaataaagaaatcatctgaatagtatatctctgaagtttcatattcactcattttgaatttaatctccttctccattattgttttaatctgatttacatcaaagggtacaaactttttagcatacttatttgaacttttcttgaatacattaataatactaggtgcattagctttcaagaatggaataattggagtatcatcctcgttataggttaaaagcatattacgataacaaggttccggatgtttatcattgaaaaacattgcaaaatatgcataattccccattgagaatctccataaaaatttaggatttcgaagatataattgaacttcccctggtgatggactaaaatgaagaggagttacattaaagaattctgcctttaagaatggtgccttatatttatgttgtaaacaaaatcttatcaaacaccaagtataaagcataaatatttgtctctgtaatacagcctttgcagcattgtgtaattcagttgttacaaaaccaaagtaagatccgttactagcttgaataaattgtgatgttccgaaaagacataaagttgtgggagcaggattaattatttcttgatacaagggataaattggtgatcctagtgagaagtacatgattcttcttattctacagtatctgagttatcactaatagcaaagctctgttaactgaaatgaatgcatcttcactagagtatgtacactgtattgttcatgtatttgaaaaaggggcattttaaagaaatgataattttttttatccttttgccattctttgctttctttcactcagtgggtgtcttcatatttcttatatcaccatatggtatatatctgatggattgatgtactttagtacaaagagaaagatatatagacaacaaacaactggctgctgcctggctggtaaatgtacacgtgcctctgtaacttgacaaattttttattatgtaatttatgatgtaattaattggaagcctacataataaaaaaaatattttattcagaacattaaattatcacaacattcgatatttctgatgaaaagattaaagatctagatactttcttgcagatgatactgtaagaattgtctatttaaacatatatctaaactttgaactacaagacgagaaaggtctgagtttttgtcatgaaatcacaagtttatgattcaggagatccaaatctcccaaatctaccagatactgatcaaattctgtggtcagattatgatgattatttatcaggaaatgtatcagatgaaagttattcaactgaacaaagtagtgatcatagagaaaatgatcatgctgataggaaaagtgtgaaaagtttgaaaagtatgaaaagtgtgaaaacacttaagagtaataaatctaagaagaaatcttcaaattctggttcattcttatcgaaaattaattcaagaaaatctgaatctcatagtaggaaaagttcagggaaatcatatgagaagagacctaatttaacttttgtgaaagatcgtaatagtattgattataataatgctatattagattcagatgatgatagcatggatgaaaaattcaatatttcaaataatcacaaacaaaaaaggaatcaaaatcaaggaagccgtaaacatagcaatacatcaattggaaatgaaactgataaatcaataaattcagaacaagataatttagatcatagtagtagagaaagaactggctcaattttcagtatgatacgactgccaagactgatgacaacaactagaagaaaatcagaattactaaattcaccatctttacaatatcagtcaaaggctaaatcaaattcatcaagtaaaaatagtacaccaagtccttcaaccaacaagtgcacattcatttgctgctggtgattcgggaaaatcatagattacatccttccttcagtagtttaccgccaacagcttttgatgaagagctcggtgatgttgatgctgaaaacttttatatggatagagatgttagttataataccaatggtgttgaaattactaataataatgataatgatgatgaaaatgaagatatgggtaacatatctgatgacgaacatgaagattatgatgaggaagaagaaggtgatggtgccgctaataataaacataaaataaatgctggtgataatgatggttatgaggataactattatggacatcataactttactgatgaaaagggtgactattttagtgatgaacacaataatacgcctaaagctccaaatattattgttagtagaataaagagtagaaatgccatatcctgaaaatttaggtcatattagaaattgatgataaacatccaagaaaaataatgagtactgatactgattatgaatctgattttaacttgccacctaatacgtattcatttcaacctgaatctattttaaggaaatctagaacgagagaatcaggatattctagtaatataccgagtaaattgaatacaaatggatcagatgctgatgatgaacctgaagcaattgatgaaaacattgaagaatctgttaacaataatgatgtagataatgataatgagtatgatggtggagatgatgaagatgaagagaatgaagagaattcaaaacgaaaacgaaaatgatgatgaaaacacacagcctaaacataaaagtaagagtaagagaagaagagcagctagaagacgtaagagaaggtctagaaaatatgttggttcacaaagtaaaaaggaaagaacagcatgggaaccgggaattgatttaactactacgaatgttttcctgaattcaccaggctcgattattacagttactgattattccaaaacaagatatagaattagtcattatgatttatattcagaaatgaatcctaaatatagtaaattttctgaagatgatactattttaagtgcacatgattttgatgaagcatatgaggaaaaatcacctgaatttaatgaatatattgaatacatgaataaagttagtgattctcattatgaagttgaagaagctataaagaacaaacctgcatggtctcaagttagatggattaatgttaatggattatcatgggaagctatcagtattattggtaagaaatataatttacatccattatcggtggaagatctggttgatattccacaaagaactaaaatggatatatatcatcaacatttatttgttgttatgccattactgaaattattaaaagttagaagatattcagatgataatgatgagacttatttcttaagactacgtcaaaaaataagaaactatatgaatgaagatgaactggataaaactagaggagaacaattacgaacctcagaaagtaatactagaccaacacactctaattcaacaactcaatcaacacctcaaccacctgcatatgttggacctacctcagcagctaatggagattcacaaccaaattcacaatcacaatcatcatcacaagattctaatttaaaagaaatcgatacagaatctacatatccagctcctaaaataattactaaaacaattgcaactaaagaacaattaagaagagaattttccagaagttcaacaaaatcacaatatccatctcaaaatctcttacaggagaaactcgatcaaagatccaataatcctaattttacccaaagtggtataaatgatcgtatattacctagatcgtcgagaactatgaagaaaagtatggattataatacagttgaagaacataaattagcagttgaaatagagagggcatcacctggacgtagactgacagatttaacatttattaaacctaaaactggtagatataaatcacgtatggacaaaattgataaaatgagaccattaatgtcaaaatctttagcagttggagttgaacaagtttcagtgtatttaacatcagatggaacagttttatcattttttgaacattcagcaatggaaattgagagagcaattttatcaagattaagtgcagaatatacaattttaagagagacatgtaaatcatcaattttatttcattcaatacttgatgcaaatgttgatttactttatccagttgttacagcatatacaagaattttaaatgaaaaggaagttgaaattttaacagctgttttacctgatttacaacatacacaagaattgcatttaatgcttaatgaattagcaattttgaaaaattcaattttaccaatttcttcattaataactcaattaaaggatgttagtattgatattaattcaaaatttattgatgaaagttgtaaattatatctggcagatattggtgatcatttattagcatttattgatgaaattaatagtatgagttcaacaattgaaaatttaattgatttaatttttaatacattaagtgttgaaacaaataattcaatgcaacaattaagtttagttacagttttatttttaccattaacattttgggcaggttattttggtatgaattttaaaattttcggtaatttagattataatgtttcatttttttggaaattagcaatacctttcactgcttgtatgatgattttagttatgagaaattcagtttggagagctttattaagaataatggcattgtttacaaaatggttggtatcatttacaaaatatgattaataataatgatgatgaaaaaattagtagatttaggagacataattttgatgctaataaatttaagaaatttcgtaggaaatctcgtaagaatgaatgatagaagttataagtagttttaatttaagataataaatagatttataaatttatataattgttgttgaaaaagatctagtagtaatctaatcaacattcacccagtgaagtaaaaataaaacggaaatgcaaaaaagataaaaacccaagtaccaagtaaaataaaaagagtaaagagtaaaaagatttcatgaaaaaaaaatagaaaagttgttaattatttgagaaaagtgtttatagaagatttaatgattcaataactttccagataaataatagattaaaatttgataacagtatatttgatttttttttgttttttgaaaattaatagctgtgttatggaagtttgaaatatattgttattgaattttaattttaattattattattatttatttattgaaatttaaatcttaaatctgaaatttgatctgcccaagcatcagtatttgataattcaaatgaattaatgaatgaatttgtattttcaacagttgaattattatcaaataaagaggaaggattgtaagttgtacaataagactccattgcagagttattattattagtattattattattggtagtattaataatactattagttgaagaaatttgatattgtaatggaattgaaattggattaacatttgaatgatcaatatgattattaatatgattaaattcatctttattattaaacatgaattgatcatcaaagttattattatcaatattatcgatattattaatattttcattattcaaatgatgttcataatcatcaaataagaaaacatcattttcattatgattattgttttcaatatttaaattttcattattttcattattattattattgttcaatgaatcaacaattgaattaatataattattttgattatttgagaaatggattaaatgttcttgatctaaagtgaaaccattattaataccattttcaactaaataatttaaagcatttaaatctctattaataattaacatatcaacaattgcagtataagaagtaaaattaatatttgggaaaaaatcataaataaaatattttgattttaaaaaatttgaataatttggatcagaattaactgcttttctaaatggacatttattgaaaagtacaaataaaagtgtaataccaatagaataagcatctaatttatcagaataataataatctgaatcatttgatttaattaaagcttcaggagccatatatttttcagtaccaacgttaaaatctgttgatttaatatatttagttgataacccccaatcacataatttaattgtaccatcattcattaataagatattttcaggtttaatatctctatgataaataccttttgaatgagaataattaataacttcaattaattgattaataaaattaatgaaagctaaatgatttgattgaatatttaaacctaaattagttttattatgaattgcatcatataaatcacctgaatctgcaaattccagaaccattataaaatattttttagtttcaaaatgatctaataattgagtaatatttttatgataacctaattttttcataattaaaatttcatgattagccataattgaaacaccattaattgattttttcattgctttaattgcgacatgagtattagttaaagtatccaaagcgcaagtaactttaccgaaagaaccagtttgtaaattacttataaaagaatatctattatttaataaagaattacccttttgatattgtaaataattatctaaatttgatttaaaattatttgcaacattattaatattattaatattatttaaatgagaaatagatgaaatagatgaaatagatgaagattgtacagctgagactgcattcgaagtcatagcagacgccatttgcagatgattttaggaaggaaatccaaaaagaaagagaagagatgaatatataatctacgggggcaaatgggatggtggcgctatttataaaaaagagagataaagcctcaatagtctcgcgataataagaaatttctagaatgtgtcatacttcactatacgataagggcgataagggcgatcttcactccttagataagagttattatctgttatatttactgtctttatttatgtttggtatctattactgcttgtgttttattacagtatagtatagtatagtgtagtaattgtatacagattatacagtaataccaacaatatacacataataacagtaaataataaataataaatgatcaccccgtactttatttttgttgagtcatcaacaatttgatttttatttatttttatttatagtaatttataataatttatcgttacgtaatcaccacatcacgtgactgtgcgcaatgtcacgtgcaaggggcatttaggatattgatttttcaatatctttataaaatcccattgcaaatgcaatttcccaaagtacaaaatatggtgctaaaacaagtggttgtaaaggatgtgataaaactgctggtgatctatgttcatgaattccatgtccataaaattgtgcaatccatgaaaaaatatgcattaaaattgcatttttattacttataccacttttctctgctccaatttccattaataataagaaaattgttccaattatacccattgttaaatgcattttagtataaaatattgaatatccaatcattacaattcttgataaatttgttgaataatttgatgctaaaactaatgatgaaaataaaatttgtggtatacaaattatatgaattaaaacatttgttgtattacgatgatatttcttataaaatgataattgttccttaagtgttaatgccattgtatagtatagatttgtttgttatatactctgttaatcaattaatcaatattatactttagtaattacaattacaaggtttattctttattctttataaaaaacatactttccgcgagtttttagtttacctcatcgcttttttcaatctgtttgtaatcgattacgtaaattaaacatgaggggaaatgcatcgtatgatgtttgtctttgtttataataggttgctataataacttattaatgttttaaatacttataatagtaatgtaaatatatatactagattattggtataaagattaatagtgtgtaaaataacaatttcaaacttaaaaattttataaatattcaattaacagtaaagtaatgaaacttttaaaattttttgatcactttaaaaaaatcaaatttttttacgtattaaaatcaactttaaaaagcattagaatattaatttaaaattttttaaattaataataataaaaaaatcacgtgaccttgtacatactacagatattaaatcacagggtacaaaaaacaacaaattccgatatagtgtaacggctatcacggtccgctttcaccgggcagacccgggttcaactcccggtatcggaacttctcttttaagcctggctagctcaatcggtagagcgtttgactcttaagtattgatattttaaccaatagcaatcaaaaggctgcgggttcgagccccgcgttgggcttaaaattttttaatattgatattttttttttctattaattacgcgttgacgcgttgaaaattcatcatgatatgcatgaattgaagaagatggcaattaaatattttactttattttatttcattctataaaaggtctatttattaaagaataattgagatatctaatttagaataatgaataattataatgcatatggtgatggagcaggttatggatctggtggtcatttagatggtggttttgataattcaaataattcacaatttgattcaaatagtcaaggtggtaaaccaagatatgcaaaacaatttatagtacctgtaactgttaaaatgcttaatgaagcaactttagaaggtggtcatgatggttcatattttactcatggtgttgaattatcttatgtacgatttattggtgttattagagaaattaatccagaggaaactcatacacgttattcaattgaagatggtacaggtttaattacaattagaatttggaataatgatgcttcaactgctcattttgataatgataatgataatgaaggtgatggtgatagtaacaataataataatgaatatttaacaggtgattatgttgaagttgttgcaacaattagagaatttaataataaaattcaaattcaaacccaaaaagtttcaaaaattaaagattttaattttattccttatcatttccttaatgttgctaaaaattatcttactataaataatccaaattctgaaatatctaatccaggttctaaatctgatggtttattcgtttcagataatgatattaatagtcaagcaaaaccttcagctactaaatcattacctgatcgtgtactggattttattaaacaacatagtcaaacaatgtcagatggtgttcatactcaatttatgagtcatgaattaaatatcccaattgatcaaattactgatgctgttaataatttagttgatgatggtcgtatcttttcaactaatgatgatactcaatttttacctttataagtattataagttctttttgtacatgtatttttattaatttccaattttgttaatgtaaaattatccctatttataatacaattatacatctttaaaagcattatctattattttagcagatttagctgcaaagaatgctgcccataaatcttcatctgcaatagtttcaccattaatattactatcattaattttagttaattcctttgcctctaatacatcatcatcaataacttcaatcttatcatcctccccttcaacttcaacttcaccttcttctaacccattctttgatctacgcaccttagctgcctgtatacgttttttcgtacttaaatatgcaatactttcctcaattgtaccttcaataataaaattccaaacagttgtttccttagtttgtccaattctatgaattctattaatagcttgaagttcaaatgataaattaactataggttcacaaaggaaaacatgtgatgcatttgtaaatgttaaacctgcagcttgtgcaactgtatttaataaaaaacatgtaatagcaggattacttttaaattctttaattgattctccaagttttttattaacacttttcttacgtgttgtttctccagttccacttttttgatcagtccatgaattcaatctaattccttcacttctcatagctgtacctaataattgtaaaaatggattccattgtgaaaaaattaatatttgaactcctttctccttcttcattaaatattttacttgtctaataatcatatcaaccttagtaccataactttttcttaagtttatattggaaatttgtctaatttcagaaatcggtaatccttgataaataaaattcatatctttttcaaaaattctcctattttgtaacagttttaaactctctaaatcattctgttcctcattatcatgttcattgttaacatcaccatcattctcgttattttctgtaatcaactcttctttaccatcatcaatagattcaataacatcaccctttaatccacctctagaataagtaaaataatataattcatccttctttaaacttttttgacataatggacaagctaatttatttttcaaccattcatttaaacattcacgacaatatttatgtccacatggtgttaatgtaccaactaatattttaaacctacaaataacacaggtatcatcaccattctgaatttcaccatccctagttaatctaccatttaatgatcttaaatatttcattctagttgttaaggcaaccgttttctttaattctttatccattcttatttgaatttccgttatttcaaccatagctgcatatcttggagaattacctatactttcaggaacataattaactaaacaatcagatctattttgtaatgctcggaaatatgcaactttagcattaaatgcataatttaacatatcgaaaacttttatcttaatatcatgtaaatttttattcttttgtttctgttctcgtttcaataactttataatctcatgtatttgtttatgttgtatactttctggtaagaaagcttgtgattcttcaataagttcgagaattgcagtatgaaatgaataccttgcattaatagttccttctggcataaaatattttcttaatttttcaagtttagaattaaatgaatcatcagttttatttgttaaatttctactattcattgtaagttctgtacgatcagttttcattactttattagatccaaaatttaatgaaccttcagttaaatttaaacatctctccctatctgataatatcaaatgaagttgatcaatatatgcttgtgattgatcttgtaatattaaatgaatagtatattgtttaccatcattttgatcttcttgttcagcaacggggactgtttgtaaaaggtataattcattaaaccaattattaattatagtactttgatcatttaattgtttcatacattctttaactcgatccaatataaatgtaataccaaaagtagtcgaatgatgttcgaattcttttgtataatcatcaaaatattcagaaattaaaggtaatttaacattagactttaccttcccatcattttcatcgttgtcaacttttgtcacatcaacatcattttcttcatcctgttcattaacttcaattacattatcctcaacatcatcctccttaacagttggaattgaatcaactgagtatttctcaaatcctttgaataatacttcaagtttactgattgaattctgtgacttcttgaaaggctcctctaataattgattcaaaatttgattagccttttcataatattcattttctaaataataatgtttcttctcttcatcagttaatgtttcaacatctataatttctatttcctcctcctcatcattttcaatctcattttcatccttgataacagttccttcagcattttttttatcatctattattttctttaaatcattaaaattatcaggtaatggtttcattggtctataatgttgataatgagcagaagctaacataaaataagcttgatgtaaatattcaagtgcaaatctaattttatttgtaagaaatgtatcatcatctaaccaatttggtaattctttataataatctaatttttccttagctaatttaataatatcttcaaatattttaacagattctgcaggatttcttaaaaattcttgaattttaccaagttgaatataatctttcatataattaacaaaacatgtagttaattcttgttcattacttgtcattaaatttttcaaaacatcatctaatgtaccaattgtaaaaatatcatcattattttcattatttttatttttattcttaattttatttctagtaccatttaaatcatcaagatttactctacctctaagatgtgcagtatgtaacaatgcatgacaacaaaccattcttaatttcccactccaacttctcatatataatttacttgaatcataatcatatccttcaccaacaggatcaccattttcatctaatccaacttgatttaaaaatctattaaataaatcttgataattatcattttcaattgtactaaatggtgatcttaacataattctagtttgctttggtaaactaacttgtttaccaaccatttcctttgtatgtcttaaacatttatttttaaataatctatcaaaaaaatatcttggtatattcatccattgttcattagtcattgaatcaattggatacattctctgagatttaagtaatgataataaatcatttaaatctttccttattaatgttccagatacacaccatgtatgaactcttggtataattgttgaaaattgtgaaactttagaaatagataatgaagctaattgtgcttcatctaatactaatctatagaattcaagtaacattaatggtgatgaataatcaattctctcagatccacttgatttacgttttggtcttttggttggtttaaaaattcctctatctaattccctacctaatactgtatatgatgttattacaatatcatgatctctcatttgataagcaacttcttgtggtgttaataattcatcttcaagttgcatatcaacaatacctctataattaaatatttttaaatcaggacatgtattatttagttcctcaatccattgatttataattgtagcaggacataaaattaaagttgtctttgattcttttatttgtctactcgaatcatatatatccgtcttaatttcgtctgatatattttttctaggattcaatctaataagtgaaattatttccaatgttttacctaatcccatttcctcacataggaaagcctttgctggtaatctattatactcaatcgactccaaatgtttcataacaaatggtgtcctgcatattgcaccattatattcattataccaataaagtgtagttggatcattatacggatgaattcttttccatccaggtgttaaattatcaagaatttcagaaattatttcatcattaacatgatttttcgggaatttcaaagttgtcagatcaactgaatatttaagcgttatctccttttctgtagtcccttcttcatcatcctcttgttcctccttcttaattgaatattgaggattttccttaactatcatttccacattttcatgacgtaacatccatttcaaactatcaacttggaaaggtaataatgtcttataaatccctttaatatctaaataaggagatttgggatcacaataatttttattcgtattatcagtaattaatgaataaaatgatgaaacagttggagggctcagcggagaattaccatttgattgataattagtaagtgcaggtatcattaataattgtatgatttcattcatatgtttataagtatcctttaaatagatagggtatatgctttctcttaaatatatggcaaaacttaaagtaaacttacttttcaaagttttatttgatcgatttaatgatagatgtatattttgtattttgaaataatcgatatgtatacattcattatttttcggtttcgttttatgaagttgatatattgcatagattaaagtatgatattcttgtgtgaaatttaattcaaataatgtatttaataatttattacgtgtttgcataacaatacttgattttttaggtactttaggaaataatctaacatcaagatccaatgaaatatcatctttatctttaaaatattcctctattgactcatattcattatcagttaatgatttaggtgatgttgattcaattattgaataatgattaatcaacggaattaagtttgtataatcaatttcattacttgttaaatccgggttttgtccaagtaattttataagtgtatctaaattgaaggaatcattattcagttcaaaactaagtgtcggtccaacagacataccctctctaacacgcacagtgtctctatcgacaaaaggagagaagtttatatactaataaaagttgaagagccttagcaagaaaaagaattaattaccacattgggaagatatcggtttgcacgacacagccccaaaagtcgacttgtacatcagctggttagtaatatacagtttaattaaaagtgatgtgaatatagcatgattatccactctttttctttttgggataattgttattttcttttttacaagtgtagagactctgtagaacagtagtatattagacaatgttagaggtatgtttaaagaatataggtttttttgtaattatggattaaaaatactaacataaaaattattaatatagaatattagacaattaattcgacacggtagacaagctgctgataatcatgcaattgataaaccattggaaacacctaaagttacaaaaccagctcaagataccaagaaacatttacattctgaagcagcaactgtacatgaaaagaaaattaaacaatctgaaatttttgaacataaacgtagagaagtaactacatctgaagttgaacaaaaggaaaaagaaagagagagagaaagagaggaggaagatgagaagagaaagaagaactatgatactaatattgaacatcatgcaaatgatttaaagccatttgcagaaaatattatattacaagaaaatttagctgaacaacatcgtagagaaattagtcgtaaatctattgaaaaatatcaaattggtaaaaaattaggtgaaggtgcattttcagttgtttatcaagcaattaatttaacaactaatgaaaaagttgcaattaaagttattaaaaaatatcaattagatgaaaagcaaagaaatagtgttttaaaggaagttaatataatgaaacaattaaatcatccaaatattgttaaattaattgaatttattgaaaatgataattattattatattgttcaagaagttgtaagtggaggtgaaatttttaatgaaattgttaaatatacttattttagtgaagatttatcaagacatgttataattcaagttgcagaagcattattatatatgcatgaatatgttggaattgttcatagagatttaaaacctgaaaatattttctttaaaccaattaaatttttcaaggatgatccaaagaatagatttaataaattacgtaaatctgataatccaaatacaaaacttgatgaaggtaaatttataatgaattatggtggtggaggtattggactgattaaagttggagattttggtttaagtaaacaaattttacttaatgatgaaaataattcacttaaaactccatgtggtacaattggttatacagcacctgaaattgtacgtgatatgaaatattcaaaagaagttgatatgtgggcattaggttgtgttttatatatattattatgtggattcccaccatttttcaatgattcaattgatgaattaactagatcagttgcaaggggtgaatttaaatttttatcaccatggtgggatgaaatttcaccaggagctaaaaattgtgtttcaaaattattaacagttaatccattacaacgttatactgttaaacaatttttacaagatccatggattttagaatttttaaataaatctgaaaatattcaagcaaaggaaaaatctaatgcaagtgaacagagtactagtattccaccacctacatcattgaataataataaaaatgttacaccggatagagttgaaaatggtgttaatcgtgtatcatcaggtatgccaggattgaatgaatctaatgcgaagaatggtataataagtgatagaccattaaattcatatcaatcagtttattcatcatcattattacatattgaaaaaatcaatgagatgagtttaagtgatagtaaaaatgatagtaatagtgatagtaatagtaatagtgaagatgatgaagatagtgaagatgaagaatttaagaatttagttggagaatttggaactgaattatcaagatttgcaggtgtaaatgaaggtaataataatggagaagatttagcagttttagaacatttattagaacctggacctgcacaaacaacatatcgtgaagaaatgaatagtaaaggagataatagaaatgataataataataattcaagtggacaaattaggaaaaagaagaaatataataaaaataatgaattatttacacctgaagttagagcaatgaaagatatgtatgatatatcaattgcagcacgtagaatgcatgaagaaggtgaatttaatgatgaattaggtggtgaaaaattagccaaaattaaaggtgaaatgaataatggaggatttgataatataattgaagaaggtgatgaaaatgaggaagatagtgaagtaggtaatgaaggtaataatgttacatcattaagaaatgaagtacctgcatttcaattaaatatgaatgatgcatcaattttagctagaagacaaaagaagagaatagttgtgtgataagaaggggggaagggggattgtttttactgtattagaattttaaatttttttttagtatttagtattataaataaaaataattgataagtataatatattattaactatataatttatacataacgattgataaaggataagaaatttgaaaaattagtaaaagaacaaataaatataatgaagggtagggtatgaaatttttttctttataaatcttagattagaatgaacaatctaatgaatattttaattgacgatcatcagtgaaaaccccccaatgagattcaactgaagaacctgaagtttcaggtttccaagattcatcgaaagcttcgaaaacaaaagtattaataccccaacctcttattgcacaaataccttctttccaaaaagtttcagcattattaataccaggaacagaactaccaaaattagaaccatcagttggccaaccagtttcaccaacccaaaaatcgatatcagttgaacctttagtttcttgaacagttttcaaagcttgcataatatcatcaaagaatgaaaaagttgaattttgttgagtttgaccttgccaataagagaaagcattagcatataaaacatctgaaacttgaattgcaggattagcggtaccatcaactaatttattccaagaatcaactgtaccaacagggatatcaccataagaatcaccatttttatcattaatatttgataataattgtttaatttctgaaattaaattagctaattcatcaccagttaaatcacctctatagagagcttctgaaccaactaaaacagatgaaattgaagattttgataaatttggtaaaagagattgtaatgattgtttctctaattcgaatttatcagaaggagttggccaaacacccattgtaagttgaaaattttcagcttcaagtgctggacctaaaatttctaatgtattacaatcagatactgaataagttttaacatgattagtataaggtgaaattgttttcaaatcttggatataatcatcataagttttacaagaacctgaattatccttaacaccaaggttaaaacctaaaggagctatagcagaagcagaagttgcaagtgataaagcaatagcagtgattgaagaaagtgagagttgcattttgccaaaggaaggaaggaagggaagaaagaaagaaagaaagaaagaaggaaggattaaagaagataaaagtaaaaataggaaaaaggtatataaggatatcatgatggaaacgaatgaaatgaagaaatgaagaaaaacaaagtggaaattgaaaacaaaacaaaaggaaaacaaaggaaaggaaaacaaagagggaaaaaattaaaaatttgtttctttttatagaagtatagaatattgtcggaatattcagtgagaggaaagtatttggtgttttttttttaaatttccgagattacgtaatgtagattacgtaatatttactggttacgtaatattgcttatgtcatcatttattggattacgtaatcatttatattgattacgtaatatttttaatttcatttaatttgatctagttattacctctttgggaaggtgaaaattttttttttatctttatctctatatctttaattttattttattatcatagagcaatgggttcaaaagataaaaaagacttagaagagattgaaattcaattggatggggatactcctctctctaagaaagaattaagaagaattaaaaaaggtaaaattacacttgaagaaattcaaaagaagaaagcaaaaaaattagctaaagctgctgcatccggtaatgaatctaaggtaagtaatgaaagtggggaaattagtgaaattaaagaatctaaggaagttaaagatgaaactaatactacaaaaagatcagattatggtatttggatgggtaatttatcatttgatacaactagagatgaagtatcaaattttataactgcaaaatcaaatcctaaaattgataaaaaggaaattgctagaattaatttaccaactagaggtactaaaaataaaggttttgcatatattgatttctttaccgaggaaaatttaaattctgcacttaaattaactgaattagaattaaatggcaggaaagttttaattaaaaattcaaaatcttttgaaggtagacctgaaaaatcaattggtttaactaaaactttaagtcaaaatcctccttcaagaattttatttgttggtaatttatcattcgatacaacttctgatttacttaaagatcattttaaacattgtggtgaaattttaaaaattagaatggcaacttttgaagatactggtaaatgtaaaggttttgcatttatagattttaaagatttagatggtccaactaatgctttaaaggataaaagttgtaaaaaattaattaatagaccacttagattagaatttggtgaagatagatctcaaaggaaagttatacctaaaagatcatttgatgaaattaatgataataataataactccactcctgtagagaatgtccaacataatagaggtttccaagaaaaacaagataaatcatcatttaagagacaacaatttaataaacctgatcaaagaatgaattcaggtattgcattagcaaatgctcaaagacaaagtgccgcaattgttaaatcaactggtaaaaaagttacatttgattaaaaatatttaaatttatatactattatactatatatattatactaatcgtaccacattttaattaattcctcagaaactgctgacggcgttaatacacctaaatctgaaactaatgcagtaatatattgatgaggtgtaaaatcaatatttgcattctttaataatccaatatttaaatcacatgaaaattctaatttattacctggaacatcatccggtgataatgggaacattctaacaaatttatgtgattcacttacaacatataatggtttatttgcattttttgctaaaactccaatttgatatgatccaatatgattaataatacctccactttcactaacaccttcagctcccataaaaattttatcaactttatttataacaaatccaacttgtgaatcatgtataaaacaaactggaatacctaatttctttaatgcatttgccatatctttacctgttttctcaatttcttcttcattaccaatattattattattatttgatcttgcctctgtaacgaaaactctaaatctaacaaatttacttttacaatatgctaataatgataaaacaactcttgaatatgaatgaactaaaactgtatcatcatccttaattaaattaaatccaatttttgcaattaaatctctactctctttagctctttgaacaaataattgaccattttcaactaaatgtttacgacatgattcccaatctgaataaagatgtgtatttcttaaaacaaatctcataaataaatcacatcctgcacttaatgatacactattatgaacacttgtctttaattcatttgttgcatctgataataatctaattaattctgatgatgttgatggttgtttaacttttaataatgtaactaatgattcaatagctgcaactggcattgtaatatctgcatcctcttctaaaaatttaagatatgtttgtttaatatcaaattctgtcatctttgtatgtatgtatgtatgttcttatggaaagaatcaaaatatagataaaaatgatgaaatgaaatttatttttattgaaaaattcttgaaaatcatgttgaccaaatttcagtcataatataatttatattataaggtctttttcctatttccttatacaacaatgtcacgattgtctaatatatcaattacgaaaattggaataatatttaaaagacaatttcatatttcaaataaatgttttaacaatagttatgaaactgaacttattttgaaaactccaattaaatcaattagaaatattggtataatagctcatattgatgcaggtaaaacaacaacaactgaaagattaatgtattattcaggattaactaaaagaattggtaatgttgatgaaggtgatacaattacagattatatgacacaagaaaaggatagaggtataacaattcaaagtgcagctgttacattaccttggtcaaatcataaaattaatgttattgatactcctggtcatgcagattttacatttgaagttattagatcattaagagttttagatggtgcagttacaatatttgattcagttgcaggtgttgaagctcaaactgaaaaagtttggaaacaagcaaaagatttaaatataccaataattgcatatattaataaaatggatcgtgaaggtgcaggttatggtagatgtgttaaagaaattgttggtagattgaaaactaaaccaattttaattaatataccttattttattgaaaataattttgataaaagtttaaaatttaatggtataattgatataattaaaatgaaaattttcatttgggatgatgaaaatgatattaatggtaaaaaaattaaaattattgatttatcaaatggtttagaaaattgtaaaaattatgaaaaggaatttaatgaaatgttaaaatgtcgtgaatcaatgattgaatcattaggtgaattagatgataaaataattgaaaatttttttgaaactgaagattattgtaaagtttcaaatgatttattaaataaatctattagagaattaactataaagggtaaaattacaccaattttatgtggttcaagttttaaaaatatgggagttcaaccattaatggatgcaattgttgattatttaccttcaccattagatatttcaccacctgaagtaatttgtaattctaatattaattctaattcaaatagaaaaaagaaaggagtaagtaatattaataataataatacccctgttatttctgaaaatattaaaattccttcaataattgatccaaatttaggttgtattataaataataataaaacattaacaacaggtttagcatttaaagttataaatcatccaaatcgtggattaatgacatttgttcgtatttatagtggtaaattacaaccaaattcaacaattattaattcaagaactggtgaacaaattaaaattggtaaattattaattatgaatggtgaaaatcaattagatgcaaaatatttaagtagtggtaatattggtgttataactggaactgatgaaatttcaacaggtgatagtataattggtaattcaattgttaaaaatattaaaaatattagtcaaaaggaaagtaatttaaaattattaccaattaaaattccaccacctgttttttcagttgcaattgaaccaacaactattgcagataagaggaaattagataattgtttaaatatgatgattaaagaagatccatcattaaaattaacatttgatgaagagagtggacaaagtattttatcaggtatgggagaattacatttagaaattactaaagatagattaattaatgatatgaaagttaatgcagatattggtgatatttgtgttacttataaggaaactattttaaagaatattgataaatgtatattatttgaagatggtacaggtgaggaaactattaatgaatctaatggtgatgatgatatcaatcaatttggaattaatttaacaatttattcatttgaagatggtaatatttatgatttattaaaagatttaaaagataatcaaggtaaaaattttaaagatgaatcattaaatataattgatttaaatactggtattatatttgataaagatagtaatccaacaaatattgaaaatgaattaaaacttgaatcatggacattaaatattagttatgaaaaattaattaattcaatgatatcaggaactattggttcattacaaatgggtggtagattagctagattaccaattcaaaatgtattaatttatgttaataaatattatatacctgaaattaaggatttaacaaataataatttaagtaaattaattaaaattacaagagaatcaattaattttggattaaattcattaaatgataatgaatttactatattagaaccaattatgaaagttagaacatttgtacttgaaagtgatgttggtaatgtatcacaagatataatgagtgttagaaatggtagaattttaagtattgaaaatgaaaatgagagtaatgatgaaaatattgaagatgattatgattataagaaattaatggaagatatttatgtaccatttgatccaactatgaaatatgttcaagaaaatgataattctaatataatgataattaagagtgaagcaccattaagagagatgattggatatttaactaaattaagatcattaactaaaggtagaggagtttatgatatggaattaaagggtatggagagagcaaatggtgatagagttaagatgattattgaaggatgatagatagtataattaattagttatataactacatgtatttacaaaatcaataaataaataaataaataaataaatagagttgggtatgtatgtattgattgattaatgaagaattatttaaaatttctttttcttttcatcaattgataattcacctgcaccagtattagcaattaataataacccaccaacaatacttaaagtttggaaaaattcatatctaagataatctctacgagaatctttataagaataagaccaataatgatttgttaaacaattatgaattgttaataaaaggattaaaattgatgcaaagaatttagttttataaccaataacaattgagaaacatgaaaggaatccaattaagataagtaataaatttaagaatgtgaaatgtaaagtaattgtaaaagtaatgaataaaacaattaacataattctaccaataaggaggaaatattttttattataatcatttgattcaatcattggtaaaccgggcattgaaagagatcttttatcaataattaaagaatcagataatgctaataataaaccaccaataacactaatatttcttaaaaggaaaggagcatcaaagaataaaccatataataaaccttgtaataggacaattgatgataaagtaattgaggaaggaattggtaattttcttaaaataattaaagttgaaccagctaacataccaataatatttaaaataaggaaaattttaacaatccattcatataaatgacggaaagttgataaataataaacttgttctctccattgagacataattctaaaagaatcttcaataaaagttgcaacaattaagaatctaccaattgttggtataaaaggtttaagagaattaattaatgataaattatcaaagatattatcgaatttatcagtaaatgattcaaattttttaataattggatttgatgatggaatgaaagaattaataacatctaaagttgaagaagatctattaattgcttgaggatgatgatggttattattgttattataattatgacctctataagacatttttcagttatttatctgtgattactatgtttaattgagtgtgtaactgtctctactccaaaagaagatcatcataaaagatcataaaatgtcagcgtgtctttaacatgggtttcatgtttccaaattttcaaaagacagaagtcgcgtctgtagtatttggggataattaagagggcaaatacttgcatacttcttctagcagagccttctcttcatttgatcttcacgttgatcttcacttttatacaccattctgcacgttgagtaatggcaactactattccttcctcattaccgaatcctcctcctcatcctccagttttacgacgtcgttctgcctctaaaactgcgcaaaatttccatcctttaccttcatcacaatcacaaaatgataataataataaaatagattccaatactaataaaccattaccacttaatacaaatattcatgtacttacacttgtatctcctgaatctcctgatgatatcttaaaattacttaatataccaatttatcctaatacaattaaaattggacgtcaaaatactccaaaaattaataataaaataactgatggattttttgattcaagagttttaagtagaaatcatgctgaattatttattaaagataatcaattatttataaaagatttaaaatcttcaaatggtacttttataaataatattaaattagatccttatattgattataaattaaatttaaatgataaaattgatttaggtacaacattagagagtcaattagctcataaaaaaattacttgtattgttaaaaatttacaatttattactttattaaattataataatttagttaatgatttattaaataatgatgatttaattaataaaaggttaaatttatttaataatacatttgatgtattattatttagtgatataattaatccatcagatttatctgaatctttttcatttgatgatttaatagatgatgaaattaatgataagaaacctattaataataacaaaccagataaatattcttcaatatcaattaatgataatggtatcattaagaatttaatacttgcagttaataatgaatatttacaacaacaaagattacgtgaaatgtcaacatttttaaataattataataatgcaatatcatcaaaggagaataccaatattttcaaactttatgaaaagatattaaaatcaaagaatagtagtagtagtagtaataataataataataataataatagtaatcataatagtaacaataataatatcaaaatagaaagtttattagcaagtaaatctaaaattgaagatcaattacatgtttcacagaatgagataaatactttacgttcacatttatcaacagcacagagtcgagaattagaattaaaggagaaactttctgaatatgagattaatatgaatcaattgcgtaattcattagaattgttagagaaaaaggtggaagaggataaggtaataattgagagtcaaaaaaaggataatgaaactaaaaacgttgttgattcggatgttaatatcaattctaataccgatacggtacctgaagatgaagatgaagatgaaaaacgcgatgatgtaagggtccatccacagcaaaagggtgatataataataaatgtagctagatatggaggtattatagcattgacagtagctgttctatatatatccaatcctataagagatctatactgtcgtatataacaagctaatagaagatcccatccaatggaagagtacatgaataaatcttggaaatcaaccgaaaaagatttcgaggcgcagtgagaaactttattgtcgaaggaataagtattccttctttattgtaattagtcttttctattgattcaattgctaatagacggttggtatatgtgacaatggattcttcaattggtattccttcttcggataaaagaattattaaggctaaaagatcaattaatcgtcgtaaacataaaaattcaagacttggttgtactatttgtaaaaaaagacaaattaaatgtgatgaaacattaccaatttgtaataattgtaaacgtactggtaaaccttgttcatatatttttttagataatgatgaattacaaaaattaattcatgaaaaggagaaaaataagtttgccaatgataatgataataataatgaataataataataatgatttattgaatactgaattattgaaaaaatctatgtttaatgataatgatgataaatcaatgagtgaggaagaggagtagaagataatgatgatgataatgatcttcttgatcccgttaaggatatcccatcaacttcaattacatctgattttataaatgaatatatgagaaacacaattcataatgataataagaataaaatatttgatgatcctaaaactccaaatttacctatattacctgatcaacctaatcatacaccaattatgattgaattttttggtgctattgatgagactaaaaaaatgattcaaaaatcatctaatgatatagtattgagtgatacaccattctatgataatgatgattcattatttaatgctgttaatgttaataaaaaattccatataattaaagaattaccaattgatcctcattatactgttgataaattagcttatgcacttgattgtattaataataatgaattacctttatttttcaaaaaatatgggttctgcaaattagatcaatttattgaaacaacttataaaatgtatcatcaatttagttattttatttagtactttaatgagaaaatcaattattttatttactactgatgttattaaaaatattttacttaaacaaacttcaattatgaaagatttattatcatatgatgaaagattatcaatttgtaaatcttgtgaagatatttcaattgaacaattatctcaattaactaatttaattaatgatatttatattcataaatatttagattcttctaaagcattacgtgaaattatgttaactggatttttaactttagcaagttcaacatcttatcattataattcaggttatagacaaagtataagtattgaacaaagtaatcaatgtattaaatatattagtacttttattgcaggtttattttcaattatgattaatgaaaataaacaaaatcctcattataaaattgaagttgttaaaggttttagtagatttatattattagaggaaaaatttattatattagaaaattataatattaatttatttgttgaaatttatactaatttaaaatcattagatttaattaaagaaattaaaaagaatggtaataataaaccatgattggtcaaatatttatactaatttaataacatttttagaaaaacattcacaatttttaaatgttttcaaagacgatacattattaggttatgataaaggttatataattagaattattaatgaatggtatcaaattttcccacatgatttagttaattattctaaaattaaatatccttatagtaaagataatgagaattcaagataattattcaattaacatttattacattaagaaatattttacaatcaattataccaggtaatagaacattagttagaaattcatttactggtagtcaacaaatgccatatgatgatgtttcaaatcttttaaaatcttattattatttaaaaactgaaaattataaattatatgcaatttatttgaattagaattattacatttcatcaatcaagatactgaatgtatgaaaagattattatcgaaaatttatatacctgaatttgttgatattaataatgattataatgttattgaacgatgtaaaaggttatttacattttggaaaaaaaggttcaacatttattgaaaaagcaaagagattcgatgttattaagatatgatacttatttaattgaagataattatgcaactttaaatatacttattgatgatgatgataataatagagatagagatagagatgaagcaaagattaaatatcgtactaatgcagaaattattaaagattttgaatcaaataataatggactttttttaaaagattatgattgtagatcaattgatattattaaacaaactgaagaaaaaatagctaatgcaattaaagatgcaaaggggacgggtaaaaatgttttaaggtatagattattgcgacctacagaggatgaaggtaccggacttgttttccgtaattgttggaatattgagaattgtattagaagtggtcgttcagagcagtgataataataattttgacaagatacatttgagaaaaagttatcaacactcataaacttttttccctcgcacggtaatttccgccggttaaaaaaatatcggcggtttctattgatgctgctattgttaatcattataatatcttataaatttattctagaacttttttctattatccaatggatagtacattcatctttagtgaagaatggtgtaaagaataccaagaaaaattcacaatctcaagatagtattaaaaaaattactcataaaagacgtaaacatacaaattcaagattaggttgtactaattgtaaaaaaagacaaattaaatgtgatgaaacattaccagtttgtaataccttgctttaaagaaaaatgaaccattgttcatatatgtttttatccgctgacaaattccaacatttagttaattctaaaaattcaaatgaacatagcagtaataatgatgaatcaattaattttgataattttggtgaatctacaacaaatgaagaggattatgagtacttttcattactgaagaataaagaaatggaagtatataacacgttaagacaagatgaacataaagttatatcatcagttgctttgaataatttgactgagactaagaaacatgaatttattggtaccatctttttcatcacgatattttgatcacttggttaaaaaacctttaatcaatgctaatgcaagtagatgctattccaacggcattatctacaactatacttaaaccacaacagaaaataggacttatctcatcaatttccaaatactctctctcaatcattacctgatcaaccatatgttagtttcatcgttacctaatgaaatgcatattgaaaatcaaatatttgcttcaatggttgatcaagatttagagacttcaattgaaaatttacttggaattactcatactaatgatattaatgaacaaattagtccaaaatttgaaagaatttatgcaactagtaatgatgaaatatttgaatttgaaaaattacagaaggaaattattttaaacaatgatgaaaattcaatgaaaaaattctgaacctgaaagtcatcatgataattacaattatgatgaatgattatgctgaaattaatagtcctttaatttctgatgtttcaggctcagattattatgagtcaagaccaggttcagtatctggttcaagttcagattcagaatcatatgtacagagaagaagaaatattgaaattaatcttccttcaccatttaaagtttacactccagcatttcaacctgaaacggatgattatgaaccattaccaagtgcaagaactattgataaaacttttaaaatattaccaacaatacctgaaagattaagttatatgtttgaaataattacatcacctcgtgatcaaatatctgaagaacatattcaatatttccgtgaaaaatataatataactgattttgatgaaatatattattcaaattataaaattttatgtcaatttctaattttatttagtaaattagttagaaaggcaactattttatatattattgatgttactaaaaatattctttataaacaaaagacaattttaagagaatcacttaatgatgatagtagaattagaatttgtggagtttgtgaaaaaatttcagttattgaattatcatgaattaacaaatttaattaataatgattatattaaaacatattcacgttcaacaaaggcaattaagagaaattagttatgacaagttttgttacattggcaatttgtacttcatatcattataattcaggttatagacaaaatattagtgttgaacaaagtaatcaatgtattaaatttattggtacatttatttcaggtatgttttcaattgttataaatgagaactaaaattgaacctgaaaatcaagttaaaccaattattagattaagtaatgctttcttagatagagagaaattagttataattgataattttaatagtgatatagttaaagaggtttatcaaaaattatatcttttaaaattattcaagattgataaatttaatgataaaatttggtcaaatccttatacaaatttaatgttattcttagagaaacattcacaatttttaaaagtttataagaagagaagtttattaggatatgataaaggttatttaattagaatgattaatgaatggcttcaaatacatccacatgatcttgttaatttaacaaaatttaaacaatctaataggaatatttcacaggataaagaaattcaaataataatttatcttacatttatatgtgtaagatatgttttacaagctatagttccagctattagaacattagttagaaattcatttacaagtagtactgatatgccatatgatttacataaaaatatacttaattgttataaaatgttgaagaatagagatcataaaatatatgcaatttatattattagaacattaacatttatgaaacttagatgtgaaggtactgaatcaatgttaagaagacttcatatacctgaatttttcaattctggatcaatgccaacatctgaaaaatgtagtagattattgaatgattggaaatatggtgatgcaattaatgaaattatgaaaaattcatttgatttaaagggagaatatttaactaaatcgaattatccaagattaaacacagatgaagtacaaattaaggaggaagagacagttaagatcagatttcgttctaaatttcatttaattcatgattttgaaaaattaaataatggattattatcacaagattatgatcctagaatagagaaaattaaatgaaataaatgaaataccatcagataatggtaaatttcaattacttaaacctggagtatctgaagttagtgctgattcattaatgaattgttggaatattgaaaactttattaaaatgaataaaggaatcgtatagaaagataccatgcagaaccctctttttaccaagactaaatctgctaattaacgttttagttcttttctaataataaaattaagaaaacctattgtttgtttctctattgttctctataattagttaatttgcatctacgttttcaggttttagctttttgaaataacaaattgtacattcaacagttatatatccaataaattactattacaaaggcctgtactgtataattctccctgtattctctacgtaacatctattacaaagaagtgaatcagaagatggcttattataaaagattaatgatcatcaacagtcaataacccgcgttgatgaagtcatgtatactgacaaggctcagattggttctgtagggtatataacagtttcttctttattgtatcacatggtatcgaaggttattatatcaggtaactattcagatcgttctttcgtatcaacgttaatctcgtatcataatggatacagaagcatctaataataagagagatactgaagatgagaaaactaaaccaaagaagccaagtcataaaagacgtaaacatacaaattcaagattaggttgtgctaattgtaagaaaagacaaattaaatgtgatgaaacattaccagtttgtggaaactgttcaaggaggaatgaaccatgttcttatatgtttttatctgctgatgatttccaacaaatcattaatttgaaaaatttgaaaaatttgaaaaataatgatgatgatagtaaagttaaaagaaagagtgataattctcatcgtatggcaaaacttgataatatggtctctgctggattaaataaattagcaatgtataatttattagttcaaaatgaaggcagagaaaattttcattttgaaaataaagacaaagttgataaaattaaattaaatgatcgaataggaccaacattggctaatgaatattttgatactctcctcaaagataaaagtaataaaattgaagataataaattaaataattctaattcaggtatggagattgaattggaaaataacttattcaagaatcaacctttccaatctattgttgatgaatatatggtacatgaacctttactcaatcaatttctaaactcaattaatgaatatttaagtaatgacgaagaagaggaagaagaagaagaagatgatgatgatgatgatgatgatgatgattctggaatatatcagattgaaaaattaaggaataaattaaaattaaagaatgattattcaattaaatacccaggattttattctgaaaaggctaaagataagaatgatctaaataatgatacatcaaatgaaacatctactgataatcaaaaaaattcacaatatgaatcaatgggtttaaatcttagagtaaattctacatctgatactggctctgatactagttctgatatttctcacagctcagattctgatccatcagcaaaaccaatggcttttggtaataatgttccatctccatttaaagttgatacccctctatttcagcccgagatgaataattatgaaccacttccaggagctacattgactaataaaagtttcaagattttaccaaatataccgaaaacattaaattatttaattgaacaaatatcatcaccagtagagaaagtgtcaaaggagaatattcaaatactccgtcaaaagtatggaattgttgattttaatgaattgtatcattcaagttataaaatatatttccaatttcttattcttttcagtaaattaattaagaaatcaatttttttatatgttgttgatgttttgaagaatattcttttcaaacaaaagtctatcttgaaagattcattgacagatgaaaatagaattagaatttgtggtgtttgtgagaaaatatcagttatgaaactttctgaacttaccaagttaatcaataatgattacatacaaacttattctcaatgtacaaaggctaaaaaagaaattatgttaacaggtttcattactttaggattatgtacagcatatcattataattcagggtacaggcaaaatattagtgtggaacaaagtaatcaatgtattaaatttattggtactttcacatcaggtatgttttcaattatgattgatgaaaataaaatgcaaggtaataaacaatttcaagcaataataaggtatagtaaggctgttttattgagagaaaaaatggttattgttaaatgtatcaataataagataataaatgaaatttattatcaattatattctttaaaattatttaaaattgacaaatataatgaaaaactttgggcaagtccttatatgaatttaatgttatttttagagaaacattatcaatttttatcagtttataaagaaagatcattattaggttttgataaaggatatttaattagaatgatgaatgaatggtttcaaatatatccatatgatttagttaatataactaaattaaagcaaaaaggtaagagagttacacgtgatatagagattcaaatgattatttatttaacatatatttgtatgagatatgtattacaagctacagttccatctataagaacattacttagaagttcatttatagctagctcagatatgccatatgattcacttgaaaatttattagattgttataaaatattgaaaaatagagattataaacattatgcaatttatattattagaattataactttcttgaagataagatcgaaaaaacttgaaaagtatgttgatgaaaatttatattcctgaattttcaagtactgaaaaattaaataattctgaaagatgtgaaagattattaaataactggaaatataatgatataattttagaagatatgaaggatttatttagtttgaaagaagattatatatctgaatctaattatccaaaattgaatacaagatcaggtgaaatagatgttgttaatgataataaagatggtaaagttacaaataaaattaaattacgtactaaggctgaaattattaatgattttgaaacaaataacaatggattactttcattagattttgatcctagaaatgaagaatcgagaaatgaatcagttataaattcttctactaatgaacatgatattaatattaatgctatattaatgaattgttggaatattgaaaattttataaagttaaataaggagtagttctttatagattgtatttaaatcattcggtatagaatcaaaagttttcttttctacttttaaattgtaattaggttcttcactattattattattattattgatcatataattattcattcttgtttcaacaacttttagataataaatttgcagcttcttcaatatttattgaaacgttattacctaattcattataaacacttgtctgtttataaccttctaaaccacacattataagattaggattatttaaatatcgaagttcaggattaatattaatacttaaaccatgagatgtaacatttcttttcaaatttaatccaatacttgaaattttcctttcactactattatgcaacaatccaaacacctgtattattagtagttgaaacattaggtactttcatttctttaatagttaataaactacattgttcaataaaattaacaaaacatcttgaagttaatctttcccataattttaaatcccaaataaaataaccaactaattgacctggtccatgatatgtaacttgaccacctctatcagttttaatatattttacatttgaagtacctaaaacattaccattttgatcaattggaatattagttgccttactgaattgattttctcttttaccacctgtataaattgaattaaattcaaatgttaaaattgttggataaatattattaattaatcttgaatttttattagttattttataatttaaatgtttttcaattataaaattttgtaaatttgatgcatcttcataattagttaatcctttaaaatgtaaatgtttaatatttgtagctaattttaaatgatttaaatttggtgggaatctaactgaacatgatgattcattaagatttggtagtttaattgaaaacaatcgtttttgaatttgaatatatgacatattcaagggtatttacagagttgtttaataactatttacagagttggttatattaaataatataaaataatgtatcaatgtttaaacaatataatctattgaaatggcatgtacgcgttaagttatcaacaaattgaaagatgatcttctattataagacatgtatcttcttcttaattttaactggcttcacgtgatagatgaagatatgcgtgttttatgtgtagcagagaaaaatgccatatctaagagtgttgctggatcattgtcaagagggtcatttcaaactagagattctaagaataaatacgtgaagaattattcatttaaattcactttcccacaatggggggaatgtgatgtagtaatgacagcagttgcaggtcatttaactaataaacaagcacctcaaggttatggatggggtgaatgtcttccagaacaattatttacttgtcctctttatgatgtaattagttctgatgataataagaaaatttctgaaaatattattaatttagctagaaattctgataaattaatgatatggacagattgtgatcgtgaaggtgaatatattggatgggaaatattatcagaggctagaaagggtaattcttcatttgatttaaatacaactttaagagctaaattttcacatcttgaatcaagtcatatttatcatgcagcttgtaatcctattaaattagataaacgttcaattgatgcagtcaatacaagacttgaagtagattttagaacaggttattgctttactagatatttaactgatcttatgagaaataaattgaaaagtaaagaaaatgataaaacattggtaagttatggtaattgtcaattcccaacgttaggatttgtagttgatagatttaaaaggataaaatattttaaaactgaagaattttggtatatttccattactttaaagaaaggtataacatttaattgggatagaggacgattatttgatagattattaactatttgtatttatcaagattgtatcattaatggaggtgataaatttatagttaaagatgttaaaaataatataactcatcattatgcaccattaccattaacaactgttgatttacaaaaagattgttcaagatttttcagatatggtgcaaaggaaactttagatattgctgaaaaattatatacaagtggtttaatttcttatccacgtactgaaactgatagtttccctaattcaatggattttaaaaaatatattgaaattcaaaaacaatcaaatgattggggtgaatatgctcaattattattaaatccttcaaataatagatttcgaattcctagaaagggtaagaataatgatgaagcacatccaccaattcatccagtttcatttcctaaaaatgaattaagaggtaaagaaaagcaaatttatgaatatattgttcgaaggtatttagcttgttgttcaacagatgcagttggttcaaaatctacaattcaaattcaatggggtaaagaatttttttcaacttcaggattagttgttcttgaacaaaattttttagaaatttatacatattcaaaatgggaaagttctaataaggaattaccaaatattaaaattggtgaacatgttaaattttcaaatgctaaaattatatctggtaaaacatcaccacctcaaccattaacagaaactgaattaattgcattaatggatgttaatggtattggtacagatgcaacaattgcagaacatattgaaaaaattataaatagaggttatattactaaaattaagaaaggttcaggtaaatcatcacaatttgttttacaaccaacaatattaggttatggattagctgatggatttggtaaattaggatttgaagatatttcattaactaaacctttcttaagaattgatatggaaaataatttaaaatgtatattaaatggatcaaaggataagaaaactgttatacaagaaattttgaaaatttatgaagattcttatcatataactagatctaaatcatcaattatagttagagcatatgaggatgcattaaggcatacacaagaagcataatttataaatatatatatatatatatatatatatatacttaacataattcaattggtggtggtatatcaggaacgttacctaattggaaactatcagctttaaaaatttcaattattttatctccaatatcagataattttgtcattggtatttcagcttcacattgtttaaattgtacttgttgatttgatgttgaaaattgtgtattattgtttatattattattattgttaatattagtattatttccaaaaggattagtgttattttgattattacttccaaatgcattacttccaaatgtatttgtagaagatgtattagcagaaccgaatgggttggcgggttgtgatgatccaaatgggttagcgggttgtgatgatccaaatggtgatgtattggtattattagttgatacaccaaatggtgatgaattagccatagctggggcaccaaatggtgatggattagcattatttgatacaccgaatggagattgtgttgtagcaccaaatggtgatgtattattagtatttgaagtttgttgatttccaaatcctgaacttccaaatggtgaattaccaaatggtgatgatgtattacttccactaccaaatgatgtggtacttgttgtagtgttattattattatttccaaaagaattacttccaaaacctgatgaaccgaatgaagtattaccaaaccctgttgaaccaaatgaagatccattattaccaaatggtgtcgtagttgtatttaaatttgtatttaaatttgtatttgttgaagatccaccaaatggattacttattgtagaacttgatccaaaaggattactaattcctccattacttgatccaaatggtgatttaccaaatgatgatgtattattattattaccaaatggattagatatattattagaattagacccccatgaattattattatttgatccaaatgcaccacttgatctattgaatgcattaccaccaccgaaaggattttgaatttgtgattgacctgggtgataaaatcgacaactatcaccgtaattacatctaccttgtttaaaatatttacatactggtgttcttgatgacatgtttgttcaataaaagaataaatgaaaatgaaaatgaaaagaaaaaagaattaatgataaaatttatttcattattattttactttcttgatagacaaacatgtatatttgtacaatatgtcattcatctgttatagcacttcataatgcagaggaattaaataatccacaagatttacatattagattagctagatgtccaaattgtgattcagttgcagatccatatgttgaatttgataatgttgttcttttccttgatttaatattaattaaaccaccagcttatagacatattgtttataatgtattattaccacaacaatttaatttccaattatttagattatttatattaatgacattatttgaagtttacgtttcttgggcataccaggagaaaagttattttgaacaatcatcacatacttcaatgataatttcattagtgcttaatagtccaattcaatatatttatttccttgcaactattttattacaaaatttaataatttgtatttcattaactggtttaacaattaattggcttaatttaaatcatttaccaattaattcaattaatgatttatttattgttttattatcaactttattaatttcaaatataattaaattattcccaatagttatgttaatttggccttatgatttacctattttacatgttacaagattattagttagtatagttcatttattcttattagttgaagcaattcatattgttttatcaaatccaaagaataataatattaataataattcatcaattgattattataaaattattgcaattgttatatcaagtgaaattttaagaaatatattaacaaaattaattacaggatttacagcttcattgatttggcccgtttcaatgtatgatttaattaatgatgattgggaaatgtttaaatttaaattaaatacgttatatgaattggttaattatatgttagatgatacagttattaattaaatagttatattatatgtctatatttgattaaagttaactttcttacgtacaataccatcattagtccatactaagatccatgtatcgtttttattattattattatcagtactatcatcattattattatgacatttctcaattccaatccatggtccctctaattcatcaaccattggaggatattcataactcatattaacttctctacgttcatctattgtggaaattccagttgttgatgtttttgggtggttattattattattattattattattaaggatattatcattccatatattatcaacagtattattattatcatttctagaaatagaagatgaaaatcctccttcatcactataatgttttaattcatcaatttgaattgctcttaatgcaatgaaaatactcaaaggttttaatttttcttcaaaataatataataccattaatgtaattaatggtaatggagataatgaaagtgctaaaatccatgatttttctaaaattaatgaaccaactgatgttaattgaaataataataaacctaaaataattcttctaaaaataattggcataactttaccagttgaatgttgtggatgaatatatgtataaattaataaatatttataaatataataaccaataataaaataaattaaacctgcacttaaaattttagttgaaataactgaataaattaatgttataattaatgttaataaaggaattggtaattgtaaaccaaaattaaattttggtggttcatataatgaaataatttctcttgtagttaatttaccaattaaaaaatttttaattgaaaaataaataaattgtaatattttaccccaaggtaataatttaaatggcattaaaccaataccttgaagtaatattgtatcaatataaaatgatgataaacctcttaatgattgagctaattgaagtgctaatttttttgaatctgataaatacccccaataatttgaagcagtaccagccattgtgaaaacaaggaataaattaacgaaaacgtaaaagaaatttttagaaactattgataattccatttcaccatatgaaataaaaccttgctttgatgataaccaaacatataggaaaggtattaaaccatttaataatgtatataaataaactggtaataaatcaataacaaattttgaaatccattcatgatttaataaaaaattagctaaatcaggccaaaatttttttaatgatttataattaagtaaagttgcaagatacccaacggggaaaatgaaaataacacctaaaatacctgttataactgtaatataataaattttcaattttcttgaatgatttgataaaattgcattttcccaaataacatcatttggagcaggtgcaatattagtaattaaataaccaattcttggatcaataactgcttgacctaaagtttgagcagttgcaactgaatccattgttataaaagccgttggagttgcagaataatgttgtttccttgcattttgaatttcttcatcaattattgataattgattagtataataatctaatgcatcaattttattaccaaataaacctaaaaatccagttttaatttttggtcttaatttaattgaagtagttgatataagacttgttgtactttcctctggattattatagaatgaattatttgtattttctatatccaattgtgtaatattattattattatcagttaatgaaactgaactatcaaaattcattgaaacagtatcttcttctaatgtattaattttcatataatttgaccaataaaattccaattttttaataattttaaatctaacttttaataaagaatttaaatttttccattctttacaaataattattttttcaactttaccaatatttaaattttcaattatttcctttaaatttttttcagatctaaattgtggaggtataccagataatctaattgttctatcagttattgaattttgtttacctaaaatttcttgtctttttctaataattttttcagattgattaagaagaaatttacaagttatgtaagtaaatatgtaagtgaataaggcataagttgcaagatatccattaaatgatgaaggttctgaatcattcaaatagtgatatagtatcattatcatcataattaccagtataatgaaatctaattggagatatgattgtaacagcaaataaccaacaagataataataatttaattgacattttgaaaaatccgaaggaaaacataagcatcaaggccagccaaattaattatatcatcctctgatattgaatgtaatgtcctaagtgaataccagaatgatttatttgaaatatctagtttattagatgatttattaattttattaatataatttaatctagccatgaaaatatgactatatttgccacgtaaaagagagaataagaagatagcggacaatcccaagagggaggatatccccagttgggcagacaccatcctagaagacggtggagtccttatattatcccattccattgctcaaggaaagaagaaagacgggtggcaaaagaggaaataaagaagagaagtgatgagccttaagatgttatgaattcgcgaatatttatttcattttattatagtatattaataaagacttattttattggaagtgttgtttattattatacagtatattatctcttttatttagacatagacaatggcaaaacctttattcccacaggcattatcatctactttctctcatagattgactaatgcccattctccattgtatgataatttagcgagtgcaagaacttctaaacgacagacaacttcaagagttaattatgctgaagattatggtgatttagatttagaaattgataattatgatgataataaaggtaatgaagaaacagtttctaatgattttatatcaaatgatgatatatcccaatttgtttcaaaggatgttacatatgatgatgaattaaatgattttgttaatgatgagagtaataataaggatctagcatttgatgatgatatagatgatgaagatgatgatgaagaggatgaaaaggatgaaacttatgaagatccagatgctgcatatgatatttatcgtaatttaattttaaattcatcaaattcatcaaatacaaattctaaaattaatttatcaaattttcaaggtaataaagaagctccaactacattaccatcaatttatttcactggtgaacaaattaaacatccttcatcatcatgttttaaaggaaatgaatataataccaattaaaattaaagataaatactaatggtgcaattataaatgataattttcttttcaatattaatgaaaaattaataacacctgaattaattgcatcaattttcgttcaagatttagatcttaataaaaatattgaaactttaataattactcaaattaaagatcaaattcaatcttataatgaattatttaataattcaaataattcaattattgatcaatttttaattaatgaaaaggaatttcatacagttttagatatttcaactaatattggtgaagattttttcactgatcgtatagaatgggatttattagattctacattatcacctgaatcttttgcattaacaattgttgaagatattggtttaaaaccagaatttcaaacttatattgcatgtgcaatttatgaagaaatttataaagtaaggagagaaatgttagaaaatcctcaacaattaactcaaacaattgattcattaccttattttaatttaattaacccagatgatttaaatattggtattgttcaaggtattagatatgatattaaaaaatatggtgaagaatttattccaagttttgaaaaacttaatgaatgggaaattgaaaagagagaaactgaaaaggagagaaatttacgtagaaggaaacgtgaaactttacgtgttgcaggtgggttaactcgttagatggaatggaatgtctctatgtatactttataatcataatccaatacttcattaatcaattccagactcaacgcgttgtataataatttttcaattttaatatcgtgttattaacatgaatcttccatttctttatttcatcttctttatttcttttatttctttcctattctattatacaatatggattatacatctatacctgataataataataaatataccccattgattcgttcaatcacacattcacgtgttaattggtttaaaattggttgtttaataactttcctttggttatcaattaattggttaattaattcaatttcaaaaccttccttatcttctaacacatcattaagttcaagattagctcaacatttccaatatgatgaattttctccaatacctaaaaatattttccaaacttggaaagttccaagaagtgatagaaatttccccatcgaatatatgaaaacttgtgattcatgggatgaaaaaaataaagattatagacatataattataagtgataatataattgatgattgggttaattctgaattttcaattatacctgaaattataacagtttggaataaattaccaaaatttattttaaaggcagattttttccgttatttagttatatttgcaagaggtggtatttattctgatatggatacttattgtcttaaatcaattgattcttggaataaaattgctaattttgataaattaaaaacaggtttaattattggtattgaagctgatcctgatagacctgattggtctgattggtatgctcgtcgtatacaatttgctcaatggactttaatgggtaaaaagggtcatccattcttaagagaattaattgttagaattattaatgaaactttaagaaaagatcaaagaggttatttaaataaaattgaaggtaaagattcaggtggtgatataatgtcatggactggaccaggtattttcactgatactttatttgattatttaaataataaagataatttagaaactcaatatggatttggtattggtagtaattattggttaaaaaatgaaaaatttaaactacgtaaacctgatagttgatgaaaatggtttaccattacatattaatgaaatggaaattaattataaatcatttacaaatttagataaacctaaaattttcaatgatattgttattttaccaattacttcatttagtccaggtgttggtgcaatgggtagtaaaagtgcaagggatgaaatggcatttgttatgcatacttttagtggtacttggaaacctgaaaatgaaagaatgatttaattcataaattataccatatatattataccatcaatagcattatatagattatcttattcattaaatatcatataccatatacctataccatacatgtagtgagaaagagtatattttttttccataggcatctgattacattattcttttaaataactatgggtataccgtatataataccattatctgcaacatcaagatttttagcaactcaactatcaactgagaattgtataccacatattatattaccaaagaataatttaaaatatttccttaaaaatggttcatcaatatcttataataatcaaatttcttcatcaaattattttaaaaggactcataaattcccttcatcatcatttcaatatttacaaaataaatataaggtagattctaataataatccaatttcaatttttataccatcttcacaattaaataaattttcaatttctgatgataataatattttcataccaccaccaaattctgatattttcattataaatccatattttggtccaaattgaaaattatcaacagaaattatctaaatattatgataataaaattgattcaattcattctaaaagtaaacctagattttggtcattaatttcaaatcatttagttacaaatggtactttttgggatattaatcataaaggtataggtgaagttgaaaattacttatataccatttaattatattgaagcatcatcaaatgaaattattaattcatcacaaataattaaacaaatttttcaaactccaacacttttaccaataatttattcatattcaaatataaatttattattaattgaacaaatgataattcaatcatcaatttcattaattaatcatattgaatttttaccaatttatcaaaatttgaaaaataattcatctttatcatcagagaatgaaattgatatttacgttaataaaagaattaaattgaaaaaacttatttatgatttaattaatgaatcagttaaagttttaaaggaacatccaattgttaaacattatattaaattaactccaacttatttagcaactttatcagaggaaagattatttaatattgtattaaatttaatttattcaaataaagttgtttcatcaattagtaataatattaatccattaaatgaaattattaaaagaaaaaaattggttaaattaaatttaaaagaaaatgaaaaattaaatgaaaagaatgaatcattggttgataaatataataataataataataataataataataataataataaatcagagtatgataatataatacatttaagagattttgctaaatttaatagacatattagtaaacttggttcaacatttggaattaaaactccaaaaaataaacttgtttgtcgtttattagatactcaaaataaagtataattacatagataaataattatcatttttatagaaactgtaaatatagattaaattgcattacattacactaaatgtaattttgaaattaaaagaacgtctcaatacacacacatgtactgaattttatttatttatttattattattattattattatcagaggattgattattcatcatatcaccattaccactaaaaactgatctttgattaaaattattcatgtttaatcctccaatacctcctctgccattattatcattcttgttaatatttgaattaatattagaattcatctctccaaatcctttcatattcattaaattcatattaccaaatcgattcatattattaattgtagaattattattattattattgttgttgttgtttatatcactaaagtgattcatattgatattgttcaaattcatatccataccattaagtttattcaaattgtttatattgttcatactattcatattgttcatattgtacatattgtttaaagagttcataccattcatattcatattcatattcatattcatattattgttcatattgctcaaattgttcaaattggtcatattattcatgttgctcatattatttatattggccatattatttatattggccatattggtcataccattcatattgtacatattgttcatattattcatattattattaagtactatttaaattgttcatattattaatattacccatattgtttaactcattcatcatgttcatattcatattaaaattattcatattgagattcatattattcatcgaatttaaatcaaaattagtattggataaatcactaagatttagtttatttaaattcatgttcatattagttatattattcataccatttaatatatcattattagagttagaatttgtattgttgaaattattaaattcattaaatggagtaaatgcattcatttgactatatccaaaattagctgaattactcattgattcaatatttaaagaatctgttgaatcaattgttggtgtaaccgattttgatacaatatcttcattattttttacattatttccaatatcaatagtttcaacttctttaccttcattattatctgaattttgcttcttgtcaatcttagtattagtattattcttattattcttgctaaatctttcagacttatttttataagatgatgcactcacatcatttgaatattccagattttgattatttggaacagtattaaaataattgttggtgataccattattaccaattttataatttgatgatttatcatcatctaaactaccatcatgcttactcttgttgcctttgttattattattattattattattattattattattattattattattattattattattattgttattgttattattgctactttcgttattattgatatttctctttttattcttattatttgatttccgatcaatatctttattagtaatccctttatcatcaataattgagttaaccatatcagtatactgtgaatgtgaatgtgattcatcatcaaatttactgggtataccttgagatgtatgaggacgattattgttatttaaagtagatgatgataagtttttatttgaaaatttaacatcaagatctgatgatgattgcgatttaatattcctgttattcaataattgtttatttttcttatatttagaaaatttaccaaaagattcagaaggttgtaaaccaaatgaactaaatgatgaaccagcataaactgttttatttgaagaattgtcatctatttgttcactattaaaactattggattttttctttaattgttgaactttagttttagttgattcctttgattgatccttagatgattgtcttgataaagagtctcttgatggtgtttctttattgagactatttttatttgaattggacaatgaatcttcagaggaagctttagttgatgccggtttaatctccagtgaaaaatcttttggtatgtcaaaatagccaaaaactgaagaatcttcctcaattgtacaatcaatccatttaatctcgtcagtattttctaaaactaaagatttacctaaaataatgattgcaattaatcttaataagttatcattcacctttgttgttgtacctaaagttttagattttaaagattcatttatattatcatttaaagttgtatttgagtcagataattcaccaattaatgcaaggactgattcaggatcttttttataaagatggagatcattaaaatcagataataagaaattgacaggtttgaactctcttagagcgacatcttccttatataatctttgacgtattggtttagttgtaataatatcttcaaataatgcatctgggaataaagtttttataatttctttaacttcatcatttgataaatacttaactagtaaattaattaatttagctaataaatatgatacatttgtcgactttagatagactcttgcaatttctctctccttgaaccaacagaataataatcttacaacaggcaacagtgatgttgaaaatgacattaaaacttttggatcatcatttttattttggttggaaactaaattcaaatttgatgttgagttggaatttgagttcgagtttgagtttgagtttgagtttgaaatagaactattattatcatcaatatcatctttaacatcattacttaattcatcattcaacttatttcttctcttttctaaagattttaaattttcattacttacatgaacacaaattttcaaaaaagtttccaaatatctgaaaaggaaatctaaataactttgaatattttcacttgattgagataatgaaaaatcaatatcaatatttttattaactattttattatcaattaataattcaaaacctccaattaaaataaccagttgtttaaaataaaaatcattgaagatttgtttgtggaaatctaaggttgataataagtaataaaaatcattttcaattatatcaattggatgaccagagattagataaccatttttcaatctccatttgtcaggtaataaattataattcaataagattaagaattgagatttaagtaaacataatctatcatttttagtaattgttgatctttctaaagaatttaaatattcgaattttcttaaaattgaattagttcttggatgtttacttaataaattaagtaaattagtatatgaaacagttaatggggatgaagttaatgaagctctaataaaattatagacgacattaaatttatcatcttttaaattatcaataatagcaatatgattataaggatcccctagtgaaggtaaaattagcaatgataatttgtataattcgattgattttgaataattattattatcctctttagaaattgaagttgaaggtagataagttttagcaactaaagttctatatcttgataaatcaccaataaataaaacacatttatgagtaatatagataagtgagaagactaaatgatttgatcttggtaattgaagtttatcatttgaatttttcaaatctaattttaaagttgaagctaattttttaactgggatataaattgataaatcataagtatttaagattgattttaagattgtaaaataaaaatcataagcctttgaaataaatttaacgaatttatcaaataattttttatattcaacaaatgaagaagaatattgtttttgtgagttgttattagtactgttattattactcgatattgatattgatgaatttaaagatctattctttaattttgaagatttattaagttgatgaaatgaagattggaaatatttaattgcaggatgatgaatttcaatccaaactctaccaactattttatcaactgaatttgaatttgaagggttaagatgtaaactttgatttgttgaagaagtattattattagataattcattaaaattattaccaaaagttaaaatatattcatttgataaagtgtttaagatataagatgagaatttagagttacagaaagacagagtaccttgtaaaagggaagagtctgtagaagaggattgattagttaataattgtttaattgcggccttattggaagcaattgttgaatcaatatcaaaatcaaaatcaaaatctgtatctatacctatatccttctgagcatcttgaatatgaccattcaagaccccatcatcaccgtcactcatgttgctagatgaataatccaaaagagaagttcttctagataatataaacaacaacagagcctccaattaattgaaattgaaatttcaggaaaaagaagaaaaaaagtggcaaatttgtgaaaattggaaaacggggcaatttctttctaatcgacgcatcgtctttaagctttattctatttacatgatttttttatcagtgtgaaaaattttcagtttatattataatagataatgataataagtgaagattaatcttctttttatttttattttatttttatttcgtttattcctttatcaagtaatgacaactgttatccagagagtcttacattctcagaataagaatttgcttgtatcttcaaattcattagtaaattcaattttcaattattcaattaaatcaaataaaaattattcaactgaatcatcaactgaatcaactgaatcgtcaactccattattaaataaagttattacatcaaatgttattgaagaaactaaccttcatccacttttgaaaaaagcttttattaaaaatattggtccaactttaacacctgttcaagaacaatgtattaatgaatttattaattcaaaaaatggtattgttgtacgtgctaaaactggtactggtaaaacttttgcatttggtatacctgttatgcattctgttttatcattaaaggatgaaaattttaaacatgctgataaatatgttaattctgttattttctctccaactcgtgatttagctttccaaactcgtaaatcattatctgaattatggtctgaatgtggtggtaaatcaaatttaaattcaaattctagaagagattcaagagattcaagaaatagaagaggttcaagggatagaagaggacaacaacaacaatctaatgataaatctgaatcaattcctttagttattggacaaactccttatagatctaacaatgaattattttacaggtaatgaagttccaccaattgttgttgcaactcctggtagatttatggatatgttagaaaatgaaccaaaatttcgtgatacttttaaatatcttcaaaatattattattgatgaagctgatgaattattaaatggtaattttaaagaagatattaataaaattattgatgaattatcatcaattcgtgaaccaattccatcaattgaagattcatctaaaatttataaacctaaaacaatgttattctctgcaactgttaatgatgatgtatttaatttagctgaacgtgcaattagtaatgatttcccatttgttgatgttacaggtgctaaaactgatgaagttaatgaaaatattacacaatctttaattcaaactgattcaatctttgatacttatgttgcttcaattaaatttattttagataatattcgtgaaaaaaattttaaaccaattatctttttaagtacaacaacttcagttgattttatttcaaaattattaaatgatgttttacaagatcaaaatattcgtcgtcgtgttttatcatttcatggtaaattatctcaaggtaaacgtgattcatctcaaagaattttccgtgaaaatgataatacaattttagttgcttcaggtattggtgcaagaggtatggatttcccaaatgtttctcatgttattcaaattggtgtttcatctgaaattgattctcatactcataaaattggtcgtactggtcgtgcaggtaaaaagggtaatgcattacttttcacttgtaaattagaggaacctttcgttaaagctttaaagaaaaatggtaataaattctcagatattacccattttgatgcaaatgatgaaaattcaattgaagttgcaaatattattaaagatcaaactagatcttaccttgatttaaatgatacattttttgcatcattaactcattatcgtaatataccttcaaaagttgcaaaattagatttaaataatcttgcaattgatgttgcaaaatgttatcaagaattattaggtgaagaaaatgaaaatggagataatgatgatgatgaaattttacctcaaaaactttcaatgtcttatactgctgctaaacatttaggtttagattttagaactactgaagattattttgaatttacaggtagaagaccaaataattcaaataataataattcaagaggtagtggttatagaaataacaatagaaactcaaagagaaatgattggtcaagaaatggtgatagaaataataatcataataattattatagaagtggtaataacagaaatgataataattatagaggtggtaacagagaaagaggtgaccgttggtaatctgcttattttgctaatattgaacattacttgtacataaaataaaaatttaattaacttttttaaaattggttaattaaatgaaaaacataactttgtaattatagtacctaataggtgatttctgtgtattaaattatcctgtctataagctatatataatatttttttattatatttattactattatactattaaatttggacattactacttagttagagaatttaaaataattttcttattatttaataaaccaataactaaatcaatattcttattattattatcattagaattttttaaattgtttaaatttttcaatttatcatcaatttcattatttatctttgaacaaatcttatttaataaaacataaatggtattatcataatattcaccatcactattacccataatgaatctctctaatttaggtggacatgtataacttgtttgattatcattatatttaaattcattttcattttcaattaatgcagatattgcgattcttgtacgatatgatggtttaacaataattttatctttatttatatcttcaattccaattgtataatcatcataataacctgattgttttagccaattaataacatttttcttctttggattatttaataattttaaaataatatttgataaattaattgtattaaatttatttaaaattttaaattcttctctcattaataattttagaagttgaaaatccatattcacattgaaggaaatcatcattatgtggaccatatgtaaaccaaatattttcatcctttccaatttctctaattgtataaacttcatatccactctttgattgttttgcaatacaatttgaattttcagtttgatgattaataaaatctataaatggaaccattgtaatattacttgattgattatcctttttatttgttattggaagataattagataatttataatataaacatcttgtatttattgataaccatgcccatagatattcagtttcagttatttcaatattaaatgattttaataatgattttataatttcaatatctttcttaaattgatcaatttgtttatttgaatgttcaagcatctctttcggtatagatttataaattttattatcaattttatcacttgataactcccatgtcattggaattccactatattcaaccatttgtgggaaactattaaacatttcattccaataagatttatcttttctctttttctctaatacaatatacatagttataatttgatgtgatgttaatttcatcaatgcttcaaatctaaatttgagtaaatttgagtgatttcatcttcatcagtttgaaacatttcattatcaaaattacttatatttttctttaagaaatcattaatatttaaattccaatatgataaatgttttaaaataactaaataattcaataagaaaatttttggtattttaattatcatttcatcctttggtattttatcagtaacttgaatacaacgtccaaattcaatatcatcaattacttttaatttatccgatattaatgattttgttttcgttttatcattcttattaggtatcgtaagccatgatttaagcttctctgtattataatctttcatatatatattgatctattgactgtaatagatataattaaaggaaatatccatataaaagaagaatcgatttgatctgaaattttttttttctttaacttttcctagtgaggaaatttaacatagctagtaaatctgcagattttcatgataagcattattaacatcatctctttttcatcaatttatacacaaataacggctagaatatgttaatattgggtcttactggaggtattgcaacaggtaaatcatcagtttctaaaatatttgaagaaaaatataaattacctataattgatgcagataaaattgcaagagaggtagttgaaccaggtaataaagcttatgatcaaattattaaacattttaatccattgattgataatttagttaatgatgataaatctttaaatagaggtgcattgggatcatatgtgttctctcatagggatgaattaaaggtacttaattcaatttcacatcctgcaattagaagaagaatactttatttaatttggaaagaatatattaatggaagttcagttgttatattagatataccattacttttcgagagtggaatggattggttatgttcacgtgttttaactatttcatgtaattctcaaaatcaattggagagattattaaagagaaataaagaacttacagaggatgaagcaattaatcgaataaattctcaaatgaaaataattgataaagttaagaaaagtgattattttattgataatgattcatcatttgaagaattagaaaataatgttgaaaaatttgttaagctaaatttacctgcaataaaggtaacgaataataataattatagttatatgataaacagttggtggaattattttcaagctatattcccaccatttgcaattttaggtatatttaatgcaactattcgtaaatctatattgaaactaaagcttagattaacgaaaacatcattagaataatttcattatttataaatgttaaaatgattatatatattattaaactgtttattaaagagtgaagaagaaaaaaagctgataattaaattaacaattaaaaatagtgtattatatgatattgtatactagcatagtatagtactaattttttgttttacgtcgtaagatagtaacttcatgtaataaagcatctaacattgatttcatatcttctctctctaacataaacctttccttttcaatcttccattgttcttcagttaccattatttaattttgattgttctattaatatttgattttcttgttcaactgattctaatttatcaactaattcattatatgatgaacataatgataaatagttatttctcaaagatgaaaaacattttaaaagtttttgattttgaataaatgataatgaattagatgttatctccttagatacattattagaatatgtgttatttttagtttcctctagtatatcaattgtttcatgttttcagtctcttgttattagtagtgttgttattattattggtgttagaaatagtatttctaatactactttggttgaccgttatatgattatttccattaaattgaggatcttctatactatctagtgaagtcaaatgtacgtttattattattattattattattattatgtgaaattagtgaattatcatcaacattattatattcattatgagtttcatcaagtaaattgttaagaggtaaatcaatctctcctgatatcattttattaatttcatcatctgctgtatgatttaatgggaatctttcattatgtggatctatgaaaagttcatttgaatcatgaattgaaatatgattattattattattattgttgttgttgttgttgttgatttctatgtgttcattcttaatgatattatggatattattgttgttattattattaatattattagtagagtttataacattatttgatgataaactatcattttgaatataattttttgatattacataatttaatatagaatctgaaacttgatttaaatccgttcctttaacatttgatgaaatattattattattagtattgttattattattattagtgaaatttgtattttctaaatgtttaactatatcagaatcgatatttgaatcagttgtagcaagaatctaatgaatcaattggagtatatgggaaacttgattcagggtgatgaatcataattttgtgttgtaccattactacttattgatctttcaattatctgtgaagttggtttattattattatgagtagtattggtagttgattttgttttagtattattagtattaatattaatattagtattaagtattagtattagtattaggtgaattgagctgcacttaaattcatttgcttttccagttctaaaaaattcaattctttattttctgatgcatttaatgaattatcaaaattatgtatatttgataaattattatcatttaggatattattaaaatccaatagatcttgcgatactagttgtgacattactaattggatataatttataattaagttttttctataaaatgggtataataataattattattaataatagtaataatgataattatattatgtatctgattcttcagtttaaagtatagtccttataactcaataccttcaatattaacctttgaaacttctttataaaataaaatttaatttagcttttaacagttgaaaaaaaaaaatttttttactaagtaaagtatagtattagtattagtatacaatattcgcactatgtaatttttatttttttacggtgtacggatattatttctttttttgaaaggattatgtaatcagttttgtgttatatgttacctttattaattatctctattttcataggtggtaattggttggatagtaagtaaccttggtgtatcactgttattgtctataactttaaattagtgatttataggctagaattggaagtaattaatggttctttaaggcagcattaaagtcatcacaattcgattataatttaacttgaacatatgcaatctaattagtacaatttttttaatctaactaaacacttgttattgtgttgtctttggaaaatttaaaaattgtaattattctattatgcttacgtaaacaacacaataacattctggctaaccacatcgaaagaacaacaagattcgcccgtgtagcgtaatggttaacgcgtttgacttctaatcaaaagattctgggttcgactcccagcatgggtgcaggcgaaatcttcaattattttttcaaataattttttcattttttataaaagaaactaagtctatttactttattataatatgaattcactctggaaacaatcactgaatggaaagataataattatatatgattctacatttagtataatttttttaaaattaatttttttttaattaaacttgtaaatagtataaattatacaaaatttagttaatttattttaatcttaaagtagtgtgacatttaccacagtattgtctgtttttcatatcagccatgaagatacctggaccacattttggacattcagtctttaatttagtaaccttaccttcaccatcaactttatagtagtttaagacagctaatttaacagacttatgtttgtgaggaatcttctttggagtagtataaaccttcttctttctcttcttaccaccacctcttaatcttaagactaaatgtaaggttgattccttttgaatgttataatcagataaagttctaccatcttctaattgtttacctgcaaagattaatctttgttgatcaggtggaataccttccttatcttggatcttttgtttgacattatcaatagtatcggatgattcgacttcaagagtgatagtcttaccagtaagagttttaacgaaaatttgcattttgggaccgtctgcaataaatgcttctttcttacctgtttaaaagaagataaatcaaagaagcatcaagcaaaactaaattatagaaagctattgaaaaatccttatatgattataaaagaaaaagaaaaaattttaaaagcgagggtaaaatgcgtccttaataaaaaaaaagagggtttaaaaattaagagccctcatttaagtcatgtgataaaaaatattaaaaaaaaaatttacattacgaactcataaagaaaaaacaaaaaaaactaatcttccgataccgggagtcgaacccgggtctgcccggtgaaagcggaccgtgatagccgttacactatatcggataattgtattaaaagcaagtgggtaataatttacactagcactgtgttcattacgtaagcctttgtataactaattaatttgtataaaactgtatatttaatgaaattaatgtaaaaaaaagcgttttaaaaagaagtttgctttaatcacaattgtaattgtactcaataaaaaactatatagaccattttgttagaatatttaattttaagtataatacaatcacttaaattaaaggattgcttgtcaaacaaagaagcaaaacattaataattgttggagttctaagcaaaatgtaaggaaagattttaaagcttatagaaattactattttgaggtttttctatttgtttaaattggtaaaaacgagataaactgaataatgttagagaaacaacttaaattcaagtaatgatcaagaattacaaagtttgtttatgttacttctcataagtttttcttattagttttacatatttttattttagtttatttatattttatttaggttttttgaataacttttactgttgttataaaatgggcattacatttagattcagtggattacaacatctatatttgattacttttgttattatggccaaaaatatgaagagataaaacgttaaatgtcgtttaacaatttttggtttatcgttagtttacgaatcaaaattctttacaaagtaaacaacatgataagtttattacaagatagaaatgttaaaaatattacgtcctaatttagaaaactttaaagttttgaaaaataaaaaacacaaactaacaaaattaatttatcaaaaaaaaggtttgtaaaaaaacatctccgagacggggaattgaaccccggtctcccgcgtgacaagcggaaattctagccactaaactatctcggataaacaaacttgcgcaagccaggaatcgaaccaggggctcaacgatggcaacgttgaattttaccactaaaccacttgcgcttgttatgtttttcttactaaaaattaatttatagatagcactttatgcttacgtaatattaatgataaactagaccatcaactggattggaaaacatgctttggttggttgggtggaatcacctgttgagattgttgagattggtaagtctgagtgagactgaataataaattataacattgtattattaagttgaacctcgaagaaccaatcaaaattcagtattgctcgtgttgaacggtaacggctccagtatagatatccatagttagttactttaaggttataaaaagaaataataatatataagttataataaagaaaaacaataagtaagttaaagaacagtaaagagtaagtggaaacttctctttatatagacaaatttatgtctaagataattggtgttttgattaataatcaaatgttttatgtttgtatttgtcatcatatgaggcattagtaatcataagtattactaatatcatatggtctagtcttttctataaatagatgaaacctagatgaaacacatctatttatagtaacaatgaaacatttgtatctcaacagctcgcaaatcagaaaagaaattattagtcaacgttggaactcttagtataagtaccacgaagaattccaaggttagttaatattacttttatgttgttattttatatactttaacttaattttatatgttatatagtttgttcttttaataactgttgttgtcataaatatggatcctgcccaaagagtcgttagattacaacatcaccaatcaaaaccatgttgattataatgaattatttgaattacaaacaggaatgttgaattcccatttttatcacccttgccaatcctgcgaaggtgaaggtgggactcatcctttttttttttcaactgtaaaggaattaaaataattctggatgaaataaacatagatattgatctaaagaatattgttggttcaatgttatcaaacatggcaaatataataatcaagttaattatattttttaacaaacaatgctacaaaagcaagaagaatgatccagagtttaggattaacaaaagatttatcacagatacttatctgttattcaaatatgaaaaatttagttcttattagatctaaattagatggaaaagattgagaataatcaaacagaaataatttacatttagttcagtatatgaagatatattgaattgatgaagcatgaataatatatgcgtataagtaatcaatctgtataaaattgtatattttaatgaaattaatgtaaaaaaaaaaacgtttgtatgtaatcaatctgtataaaattgtaaaaagcgtcgggtggtattcaagctgattattctctttctagggaatgggtccttagtgatcctcccactattaaataattttttaataaatctagtacaattttttattattgctactgcttcttgaggtattaaaaatataatttactttttctatggtgtgcctttcactctaaacctaatactacaggctctacactaaaagtgaaccaaaactgtatgttaaaatttattcacacaggaaatccgtactaatctggttacttcttttataaagtattttatataaaatacatacaagatgtaataaaatatatcttaagtgaaaaacttttcacttgaactttttcggcatttataaatgtctcattatatacacgaatgcacttcgcggcacctcattggccacttccttgcatcccaccagctcgctaaaccgtccggtctattcagtacctctgacctggaccactactttcaatactgtatgaatgtctctgcatgctgaataaaacacttagagtcattgatattacgtaatcacatccttagttggtatatgaactctacaatgcatgcatgttccttactttggtgtggcaactatacctatatttattcaaattgtccaaagacaaatgtacttcgaacccaacatatctaataaaaacaaaaatacactgtaccattatcttattctattattagggtgatatactaatcttggttaattttttactaaaacaaacatctactaagttatgggaacctaggtgtgaaataaccactaactaaaaaccaaatcttgggtaaactatattaaggtgtgcttatcattatcattaattagcaacagtaggacatttcagaaacaaagctgagccacttttgaaatttgtgagttttttattcacatcttaatttaaattttgaattttaggtttctcatttttaacctttagctgatctctacatgattagtaccgtttttaacagaatagttaatagatttcaattctaatgataccttttcaaactacgcaaacattaagataaacccaatcgtagtttagcccccaaatgtaaacaaaagagtgaaaagtaaacaaaaaaatggaattttaagaaaaagtaaacattgaaattcgagggtaaatgttaaatgtacaaaatgtaaacaaaaaatcacaattttggctttttttcacaacttcacctggtattatctctacaatcaaaaggccttacgcttagcggaggtcatacttatcaatgcgatgattaaggcattacattgatacaaaaaacttggaaattgattttttaaggggtcttatctatgtagtatcactaaggatattttaatgaaattattgtaaataattaatacgtttcagctaagatacaaaaaacaagagaatcagcgttatgaaggaaaaaagaaacgcaagtaaaacaaaaaaataaaaaaagaaacgacagtcaactttggaattctaaatgttatgacaacaacagttatcaaaagaacaaactatatattatataaaaataacttaaagtatataaaacatgttgtaatctaacgactctttgggcaggatccatattttacaacaacaacagtattaaaagaacaaactatataaactataaaataacttagattatacaaaatattaacagattcaatatcaaacctaggaattattcgttctacttatacttagaattccaatctttactatcgtttctttttctaatttgtaacgtttctttttttttgatttgtgagcaatacttaatcctaatcagttttcaaggctcaacttaataatacaatattattatgtattatttagtttcgcttagaattaccaatctcaacaaaacaaccacatcaaagtaatattagcaaacattggaatccttcgtagtacttatactaaggactccaacattatctaataatactgaaattggtctttcgaggctcaacttaattagaattaccaatctcagtaccctgtcatgctcataaatcaattacatctttgccaccccagccataccagccatttcattgaatttgaccgtatttaaactttttgtcaacatgccagcaatcatataattagtacggttaaatttaatttctcattgctttgaatttcatctctaatgaaatgatgtctagtatctatgtgctttgttctttgatgatgaactggaatttcagacagcaatttacagccttcatcatcttcatatagtcgaagcagtatttccctttaaacctaaaccgaccaacaattgtctaatccctgatacttccttaactgcatctcccagtgtcatatattcagcttcagttgaagatagagcaacagtttgttgttccttacatttccatgtgataattgaattacctaacttaaaatgtaaccagccattgattttctatcaactctgtcaccaccccagtccgcaacgacttactaaatcaaaattattactttctttaaacaacaaacccaacctagttgtacctttggtatatcttaaagtatgtttgcatgcaaccaaatgtttagtatatggatctttgataaatcttgataaatatgaagcagccaatgctaaatctgttcttactgtattaacagcaaactaaaactttcctaccatgcagcagaataatgtagcatcagattctgaaagtttcaaaccatcatcaactgaattaatgttctaaggaactggagtagacacatccttacactcagttataccaaaatcatgtaacatattatttaagtgtttatcaagatgtaggatagaccatttgaattttgtgaagttttcattcccaaaaatttatttaccaaacctaaatccttcattttaaaacttgagtttaacagcattttggcttgattgatgagcgccatgttattagataaaaataataaatcatcaacatacaattcaactaaaacaacttcatcattaaccattcttgaatattaaccaaattcagataatgaccgtttaaaacctgcagacagcattgcattattaattttcatattccagcacagaagagcctggttcaaaccataaagacctttacaaagacgatataccatatttgctggagcataaacgccatctagaattttcatataaatttccttttcaaggtccccattaagaaaagctgttgtgacatccatttgatgtatcattcattgaagttttgcagctatagcaaacagaattctaatactttcatatctaactgccggactaaaagtttcaccataatccacaccttgaatttgcctaaatccttgagccactaaacaacctttaaacgttggtggagttgtattacccttgatattaaaaatccaacaacaaccaagtgtccttttgtgtgaaggtactcaacggtatcccatgtatgattttctttgtgtacccttagttttttgtcaattgcaacttttcagaaattagcgtcaggtggttttatagcttgtttaaaagttgtaggaataaattctccagttgatggagttgaagcatttttaattactctgaaaatagcaccaagaaattttgcatctctttttgggggtgaaccccttagcatcggtaacagaggaaattgatctgacccactgagaagaagaacttccatcagtaaattgattgattaaagtaattcagcattacttgggagattatcagcaatttcagaataaattttatcaatgtaatcaagatcaactcaagcttgatcaaattttaaacgacgttgttatctccaataatgttaagtttattgatacactatttccgtataagaagtttgcaaaattaccagatgaaggaatgaaacatctataagctttatgaaatgtgcttaaaccaactagaatgccaaaaactgaaacaggagcaaatgcagaagtttttttctctggaggagctaagcataacaacaaacaccaacataacaagcagcaccaaagggatgaataatatcacaattcatactatctttcaaacgtagatactatttagattttcagcaggatatctattgaaaattcagcacttttaacagcctcagaccaaaaggtttcaggtaaaccagaagagaacaacaaagtacaaactttttcttctatatgttctttcaacaaccccattttgagaggtgttataaagaacagtcatctgatggacagtaggcatacatggtgaactgaacattttcaaataaaaaaacccgccatttgattgatttcaggagtattgttaaattgatagcaaaactttctggaagatagccaaagattaaccagaagaagcacctttttttctagcatcaacagcagagtcagtcaaattagaaagttttttaacagatataagtgaatatcttcttctaataaacatcaataaatcaaaaccaacagcagctcctgttttgaatttatcaaggatagctggagcaacagtacaattcataattgattaaataatcaaagtcaaaagcttttgaatttggacactttgaacatcggtggtatcaggagttaacatttcgataattaacagcagctaataactttggggagcttatctttagggagtagagtccaaagtcatactaagaattttaacgttgactagtatttttgtttctgatttgcgggcaagacaaaatttgattagtcttttgttgagatacaaatgtttcattgatatgtttcatctatttatagaaaaaactaggccatatggtattacttatgattactgatgcctcatatgatgacaaatacaaacataaaacatttgattattaatcaaaacaccaattatcttagacatgattttgtctatataaagagaaatttccacttcttctttactgttctttagcttacttattgtttttctttatgatgacttatatattattgtttctttttataaccttaaagtaactaactttacttttgtttatcttatttaaataatattaaaaattatatttcagcttacttagtaatatggattttacaaatatgttacctttatacaacaatgtaatttgaacgtttgacaatatttgatgtaaatttgagggcaattcaaaatatactttgttctattgtcattaatgagccaactaacctttatcatttttccgggtaattttttaaaatacaatcaaataatataaacatttataaatgaaacttatcaaaaattggttcaactactattaaattcaacttttctaagagtatcaagacatattgaattaacaccaactatacataattcttttgagaaatcatgagtttctggatccgaattttcacagaagattttttattttcttattcagacctaatcacttttttaaactttataaaacatcaccttgccaactcttcttattcttccatatgattgaatagtattatcatggccttgtaaagcaatcctagtgctttttagattaagaatgaaaaaagttcccattgatccatcttcactcccataacttcgttttaaaagtgacacttttatggcatctattacttagccagcactataatttgatgttccaagccagaagggcaaatccttttggtatctgctatcaaacctgaattagatgcttttcaaaaatgactgctactatttactattaaaggctcaaaatcaccacgtacttacaaggccagactatggagtggaaaatatcagaattgttcttgtaaggccagctcaacttatgttgcaaatttataaaacggatgtttctgctgcatttttaaatggtatttttagcgatgaagcttttcctggtttttgattcttagtagacttaaaagtgaaaataaagttattttatgctaaaaaataagggctttttgcattttactttaaaaataattttaaaaaaaattaatgcgagctatgtggatcgaacacatggcctccagatcttcagtctggcgctctcccactgagctaagcccgcttttttgattgtgagtaaacggtcgtgccttgtccttggatcttttgattgcataattttaaaagaattaaacatagaaattgatctaaacaatattgttggttcaattttatcaaaagaagatgcttataaagcaaacataataattaagttgatcatattttttaacacacaatgctacaaaagcaagaataatgatccagagtttaggattacaaaaagatttattaaagatacatatttgttaatcaaatatgaaaaatttagttcttattagatctaaattagaagaaaaagattgagaataatcaaacagaaataatttacatttagctcagtatatatatatgaagatatattgaattgatgaagcatgaataatatatgcgtataagtaatcaatctgtataaaattgtatattttaatgaaattaatgtaaaaaaaaaaacatatctagcagaaagcaccgtttcctgtccgaacaactgtagttaagctgctaagaacctgaccgagtagtgtagtgggaggccatatatgcgaaactcaggtgctgcaatcaaatcaaccaacttttaagccgccgaacacacgacaattaacggaatctgaagccagggatcaatccaacaggcctccacctacaattacatcatcctctgagccaaattgggttgattatgcactatatgtgaaggagaccaatttattgcctcctcaacaaaaaacaattactactcatcctacaactaacaatttacaaaacaaaaacaatctaacaaacaataacacttacccagctattcctaactcttttaacaactctcaaactgctcctacaaaccacattaatgcagctaatccaacttacgcccaactagttcatacatacaaaacacaacaacaaaacgtccgaaaaaattttcatcctacaaatcgccgcgtctccgcattcaacaaaatctgttttaacaaccctctagaacttgaagaaatgctctctaacaaaacagagtaccctagtgtcctaaagtatgacacacctttcaagattacatccaactccagaaacctcacggaaaaatcaatcaacacttttccaaaccaaatttttgatgaattaaataaagatctttctgatttgaatcagattgtaaaacttgttttgaggatatcaagactaacttcactttcctccacttactcctaccaacactagcactatgtgatgacttattataccgaaaactcattgctacatttcaccaagtcgctgaaaaatcagacaaaatttacatctcttctccaccagaaaatacattggaaaacgcagtcattttaaaaatgagctatccttcttatgttagagactctgttgccgaacctctagcacaacgactttactcaaactttggaaatattatccacatttccaaaccacctgaaatgccaataaacatagcatttaaaacacccacaattaaatccgcatatgtcctcattgatttaaaacaccactcagcccccccccccccctccccaattacttgtgaagtcacactagatgacgaacaatataacatcacaacctccgtcaatccccctcccccccctacgtttctgctcttactgcaaggttctcggtcaccacaaaaaacaatgtccaattagaagaaaagaatgctttcattgtcaccaagaacataaactaattagctgtcctacagcttcacaacgctaaaatagctgaatatactccacaatggattgaaatttataacaatttcttccctgctacccttcaagaattttttcaaacagcattagaacatctcaaagcagataaaatcattggaaacactccaaatactatcgatcacgatagccaacaaccaatcggcactcaaatcaataattataacgaacaatcatttgacaatcaaaatgctagttataatcaaccatcactaaatactcaaaataatgcttataattcacaatcgctgaacgatcaaactgaggacgaatcaatggatcccgaagctaacaaatatattcaacaaccatctgataaatgccttaaggtctcactggttgatgaacactcacccccggaacaaatttaattaccctggtaaaaaccaatatatatatctatcatgataggatcgttctttttcttacttcataacaaatttcaaatcagatttcattttcaattcaactccataaatttcacaccagtaaataccattgaagaatccagagcagcaaatctttgttaatcacacaacatataatcaaataattgatacttccatcatacaaaaatcatttcaaggccctcacaatcgatacataaccgatctcaaactgacctttgatgatactgaaatacatatctgtcttgaatatgattccgcttcatcacacaccaacagcttttctaatctcaccacaataaccaaagaagatttctactaccacttcaacaccaacatcaagtcaatcaacctcatcaatccaatcttccttggagattggaacactccttcaaaccacaaattcaatacctccccaccaacttttccacaggcgaaaatagaagaattgatcgtttttacattcatgaaaacttactccatcaccactccatcaaatacaaactactccaaaaacaacctatactcaacccatctcccgataatgcttaccatcagaccagatcaacactctccttcattcccaacatctctatattcagataggaattctccattcccacatcatctgaccaaagacccagatttaatcaagttcatattccagcgtacaccaatatgggaagctaaccttattctcagcatgaaccactacatctgatgtatacaacaccgcctttcaaaagtcaaaagactctctagacttcttccatcagagcaccaatcaacccgagaaaatctatactcaaatttaaaagcaccacacaactctaatccattatgcatcacctaccaacaacttaacaaacgattcaaaatccaaacttacaatggaaaagtcacacaaaccttttggttttctattcaacaacaactccattacctccctcacagatacagaaaatcttttcaactccatcttctccaacttcatagccccacagctattagattcagaactacaaaatcttaatgccaaatttgaagaaacagaaatctttaacaacctcaaagcactacatcaaaaaggcccttcatcacccggaccagacggcatcacatatgctgcctggttccacagctgggaatattcaaaacttcatatcatacagttcgttaatcaaatacacttctcaaccagccaagcatctcaaaccgtcaactctcattcatcaatctttaactcaatcatcaaactaataccaaaaaagaattttgatcctaaagaacccaatcccgggaacctcaggccaatctctttaacaaataccatctttagactatacaattacacattgaccagaaggatcaatgaacattttcaacagattaatatcaccacatcaacaagctttcttaccaaaccgggatatccacctccacatacaaacagcaaagatcatagcaaactatatcaatgctgcccccaccatcacacgcttctctcttactagttgagttgatatcaaaaaagcatttgattccattagccacaacttcatcaccaccatccttaagaaattcaattttccatcaacgttcattaaagcaataatgtttcaatctcgagcaggtttcacccaacttctcaatggtaaattcatatatcgacccaaaatcgatatatccaatggaactcgacaaggactaccattatcatcccctcatcttcaatctttgcttggaacccttattaaacaaaataaactccaccatcaacggtatcatctataaccctctgaccacattcactccatcaaccaccctcaagcaatttcacaaaaaagtaaaaagtcaggcttttgctgatgatattaatcactttcaaccaagactccagtcgacatcaacaaaaccatccagattttctctgaatttgaaaacatcagtggtctaaaactcaatcaccaaaaaacaaaactatattgcaacccatcatcaatcaacacatcaaatcaacaatcacagatgatattgaggtgacttccatcaccgaaaatccgacctacctaggagtaccattgatgaaaaccaactggtataaaaagctggatttactaacctcccgattaagaagaatatgcttcatggaccttccacttcacctaattatacttgggattaacacttacatcttctccaccatttacttcttagatcaacatgatcctatacctacacccatcttacaatcatttatcaacaatgttaaatcaatagtcagaaatcaaatatggccaaaaatccctacaaacaaagactattggtacatcccaagaaaacaaggaggattcggaatgatggatcttgaaacccaacttcagggaagaaaagcatttttcatactatacatgctcgatccctcccagtcgggtgcaaagcatccatacctaccccaacttctgcgaatcaatcttcgatcaaatctgctatattctcaatacttcaacaataccattaacaccattcaaactcaagtcaatgaagcaatacaactgaatcaacaacatccaaccactatccaaacctcacatcacttcacccaatatcttcagcatcttcaacattttacaccatggtacttactgaccacaaatttttccaaccagttaaaacttccatcaacatcacaaatatccatccaaccatcaaaaataaccgtcagatactcggaaatgtacagagagcaacacagacaacaactttttaacgaacgaaatcaacaagaaacctggtaccttgatcataacatcattcctccatcactagggccatacccaccacctgctcacacctccctcagcagtgagtgacatcatttctacaagtaaatatatctcctgaaacacccatctaccatcctctccaaacctacctaacagcatggaggaatacagttacactaccaaatcttccagttgaagattcggaaatgactgatcacatcacctgcaacaccatcaaccagcctcaaaccataacctcatacaacaacatcctacaaaccaaattgcagaatcgatttttgaataaaaataaatcccaacaaccttcaaatatcctttaccaggacttaaatcatctatcttccaaactccaccaaaacatcaactatatccagcaccaatactaaaacttgggccaacaatgcacagcttggtgaccaagaatggaaaaacttctttaacagcatcaatcaacatatcttcaccaggccccaagattactactacttatatgcacttaacaccggattactaaacaatacattttacagtagcatgtcctatgtggccttccattcaacgggacgccaagttagacatgttattaatgaatgtaatatcaccatccatatattcaaatttatcaaaaaccaatcaaatcaacgaaatacaccacaattctccataaatatctttaatctgtccgccaacatcacaaacatcatcatttacatttatcaacaatttcattaaatttcttgtctattgtcatagagtagcttatgccaagagacctgaaatattacaatgggaaaatgagaatattatagaagatacttactgggatttcaaataccagtaaggcttccatcttattcttaggcttctcacacttcacacttttcttttacaaactaatcacatataataattaacaatttaaccatttattactagttcttttttcaaaacaaagcttaaactacaagctctatcagttcatttaatctttaagttctttttcatttttcattttaattttacaatataacaaaagggttttataggattttcctttcccttaaccggactgaatgttttattaatatagaatttattttagagaaaaatatttatagtatcttttataaatttgtagtaatacagaagttgactggaaaaaaaaagttttattaatcaagttaattatattttccaacaaacaatgctacaaaagcaagagaagaatgatccagagtttaggattaacaaaagtgttataatctaataactttagatgcagggtccattttatgacaacagtaaaagttatttaaaggaactaaataaaatataaatgaataaattaaatacaaaactaactaaaaaacttcttaaaaggaacattactaaaccttgaaattcttcgttgtattaatacagaattccaatctttactatcgtttctttttatgatttataacgtttctttttcggatttgcgagcaatacttagctctaattagttttcaaggctcaacttaataatacataataatattgtattattgaatttcgcttagaatcaacagtaaatgctataaaaattttcagaaaactacactggcgttataaatttataaaatttagaaacatgaaaatgaccattataattgtgtctaacctgccaaatggtgtttataatcaactatggtcaagcataccaaagtagtatttttactggagaattacaattaaaaaatttacagaacactggaagtcaaataaaatcaaagtcaactttggtaaaaaaacaagaagcaggacctaaaagttgctaagatatgtcgagacaataattttcctcgtggccttagataatcacaaattgaactgtcccttttatatggggcttaaatcaatgtgaaggccctacgggttaagcttattgtttttagttattattttcagtgctatagaaaaaataatggttgtttttttatttaaataagataaacaaaagtcaaatatatatgtcaagtttttaaccattatcatgtcatatctacagtgaatttccagtgtgatatattggaatagccaatactgttaaaaggttgaatgaatattaaggaataattgttgaagacctttacaacattcttgaatattaatcaagattaaagagtagaaattgttggaatcggctctaagcgagactgaatgataaatagtaatattgtattgttaagccaagctccgacgaaccaacaaaacaagcaaacaaacgacaaatgcggagagacaacgtctgaaaagttattcgcttcaaacgttgtataattattgtgtgcctatacaagtacacgttttgttttattagtacctgaagaattataaaaaaaattaattaaaccaaaaatgaaggaagcgaggttcgaactcgcgcggacaatcgcccaacagatcttaagtctgccgccttagaccactcggccatccctccaattatgctattgtaaatgaacggatgcttgttatttcttatatttaattattacacaccaaataaatgaaaagaaatcaataatttttattaataataaaggtatcaataatatcaaacaatttgctaatataaatcaattgaagctatcaattttagatatcaaagaaaatcctatctatctaggaattcccttgttgaaaatcaactggtacaataaaataaaccaattgaaaacaagactaaggaaaactatgtttttagatctaaatttatatcaaagagtagtagctgttaatacttacatttattccactatctattattttgatcaacatgatccaattccggatcctcttttaaattcttttgaaaatcatgttagaaaagatttagttaaatatttaccgctgaaaattgcagttagaagaatcaaatggcatcaacctcacaaaaatggaggtatgggtctgatcgaccttggtaaacaacttcaaggtagaagagcatatttcatttatataacgactattaaacagaagttaaaatttataaataaacatcctttgacattaataatctcacactcattacaaggaattattaatgttatgatcagaaatcactacgtttatcattgttattacaaatatgttgaaaattacatactatcaaatagagctgtacctggaactttaccaaaaataaaaataccaggcactatttcaaatggattaatttcaacatatccgttcaatcttcttctgcataaaaatcataaaatatggggaagtaatattactattgaagaaactctttcaaatgaaatgttaaaggttgcaaaacctaaaataataaatgtaaatacagggaaaataataatcgatcttgaaccaaatatcaatttcattatcgaacaccctgtaaattacaacatggatgaagcttcttcaaaaacattagcaccattaatggtgtactctaatattttcccatatttgcgaggatggtattatttgactgatattcactcagattttcaggttaaagaaactacagatttcaatccaacatcgtttttttcaatggtggaaaaaaatgttcaaaaatggaaaattgtagaaattttcaataaaaatcaggaaatcaatattgaatcatttaaacatttttcaaaaagattttacaaagaagaatttaaggataaatttaattcagattattgggatggtaaaatagaatgttgtaatctaataactctagatgcaacgtccattattaacaaaagtaaaagttatttaaataaactaaataaaatataaataaatataaaataaataagaaaaacaacagaaaagtaatattaacaaaccttaaaattttcgttttatttatattaagaattccaacgttgactaataatttcttttctgatttgcgagcaacactaaattttgattggttcttcgaggctcaacttaataatacaatattataatttattatccagtctcactcagaattaccaatctcaacaatctcaacaaaagaataataactgtaactaattgtacttaatactagtatgcgaatactgtcggtggaactggtatgcgagtagttagttaagataaagttagataataagttatcacaaccaactctcatatattgaaatgtcccgctcaagagagcttatacatgttatttatatagtatttagaactgtaattaattatctcacaagccagcccgattcaccataaggtagaatctattattcagttcttaattatattttgttgtgaccaaaatcagcatcaagtggagagattgtaaaattgtaaaatgaattaattaattaactaatttaattaatgtgatcctatcccatcactatattaacaaacgttgattttctgatctgtcaaaatcattcattttatcatttaatcttaatttatttattctctttaattattattattatttgaatctcactttcatactttaccacttgtaatgcctctattgattataatattgatattcagattatatcactaataagcttcgtattacttacagctactaaaagtaaatttatctactatacttgataataataatttacgtaagattttttgttaacgcgcggtattgggttcaatcttatagctacagtctttcgatttcaatctacacaatacccccaccatgctgtaattttacgactctttggggaggacccatatttatgacaacaccaaaagaacaaattacatgttatagaaacacaaaggcaaacaacatatagttaatattatattatacctttgttagtaattaagtgcgtgtctttttcaactatgcttacataataagtgtgtcttttttaatgttgattacataatctttatcttcattatactctgtcttttatactgttgctctaatgggcattggatgtttcaatattacaaattctttcttgcattttactccttatacccatacaacgtattagtatacaagatggaatctctttcatcagatgattcaatggattttttatcagatgcagattctaatgattttaatgatccatcagaagctagtcaaaggcaaatgtatagaacaagtcttactccctcacttaatttgaattctgctgataataatgtaaatgatgaagtattatcagataattttatacgtttgataagagctttgaaattgaaaactgataaactttgtggaaaatggaaaaacattaatttatgagatacattgatgagccaatggagaagtgaagtattaaagatatctactttgacccattgtttactgctgaagaatcagaaatggatgataaaccatttttgatgaatttaacaagagaagtagttattgattattggaaaaacataactggtagagagaaagaaagcttttctcttatgtttagagctgctggtatgccactgaacttttaaccaagaaaagaagaactgggattacaaattttagccaggaaaaaacacaggatatgtgctccaaaatcatattggaggagatgattatttttacaactttattccatcaaatcttcatgaagttgataaacataatgattactgtattagtgttggaagttttgcaccttttatccgattgaacaaagagatgattttccatatccattatactctacatatattcttaattgtataatagatgttaaaagagtgggtgtattatttgcaccttccatgagtagagaaactggcattcaaaaaaattgacattatagaatcagtatggaaacattcattttctaaaatggaagaaacattagatcccattaaagcttacaaaacaatatttaaacacaattttgctactcctccagaacttttaaagttgagatttgaacaagcagctaagatcaataatatgaattcagggattattgtgctttaactttcccacaaaaacaaaggctgtccctgtttttgaaaatataaattgggaagactataatatctgtttacgtgaatatgaaaaggccttggcaaataaacaaatcatcacgaaaataaacaaacaatacaggttaatggatatgggtaagcaaagtgtggtcagttcatttaactattatgaatcatcagattcaggcggtgccttaatcttttcttcgaaaaaatgtttagaagctcttgcaaatgccacatggtggagttctgatgctactttttcaatgttaagagatagttcgattaaatttattacagtatcaatcaaaaaagaaggtaggtgttggtaaaaaagcaagatatttctatggctatggccacattgcctggcaatgaaagtagtgcaaactataccatgtttttttaagaagctgcatcagttaataagggaaaattattcaggtgatatcaaattaaatacaatcatcacagatgattcgagggcagaaatggctggtatttcagaagcttttaacaatagggttaaagtgacaaattgcgtttggcataaaactatgaatatagaaaaataattaaatatgaatcacgcttatggtattattgatgctatgtatactttttctaaaaaaaactttttgaaaatttttgtttctgttgtttaaagctgccatgataagtgttcagagttgaagaagaagttgaaaaagacgagtcaaataatttgtaatcgaatgacggtcaaaagagtgaataaaaagaatgggagaattattgtttcggaaactattaaacaaagcatcaaattctacgaagattgtattaggtatttaaattctttttatattattagatttagataagcgttgtgttatcgagtagaagattatactgatgggggatctgatgttgaagatgctagcaatatgtttgtcgtggccaaagaaacaacagatgatattatggactctttcaaggaaataattaatgttcatccaaattctgcttcatttgtagacatacttttgcaatttaaagaaaagttggatgattataaaagaaatgaactttatccaaaatctaaaaagtaatttgtttaaattgtttataatattaaaatttaatgcctttaaaaatatgaagagataaaattaattgttgatccttcaccgcaaaattttaaagaactaaatttttttaaaatttaaccagagacataattggagggcaagaaggtaggttattattaactatacatgtactgtaaaacacgaataagtgaattatacaaaaaaattaatattgaaataaaaatacataacatacacaaaagttcatcattctttcacaccacagtttcctgtatcatttgccacttcaaagaattggcttttttgcaactttacgttcatatacccacttaattaaatcaaagtttatcaagataaaaattaaaccttcagtatctttcccatccacacctacatccacaacttcctttaacttttctttaccaattctcttcacaaaaatattttttttgatttatagatatcattgtgacagttttcccagttgaacttttcataaggaacatcaaaataataataagcaagtagctggtacagtatttgcaaatgatgcccagggttttcataaccaacaatattagcaacatattcaactaaactcggagaacataccacttgcattgaagacctatcaactaacatccaatgtgaatatactgatattaaaagagttaagggtaatgttgttcaattaagaaatgaccttcaaaatgctttacctcaaattgaaaaatcaaaatttacttgttttattaaaagtaatagtattcatataaagggtaattatgttgatgaaatcaaaaaagttttagaaaccaaattttaaatcatatattgttataaaattattatcatactatattatactgtttactacctatattcttgtttataaaaattcatttctaatagaaaaaaattaagttccatttttttaaatatttaatataaatcatcaagcatttatgtcttaaatgtattattaacatgcatggttttttttatgtaactaagtagtatcttaccgtgtggatgattacttagcataaacttatggcctatataagtcgctcgtatagatataaatatacttacgtaatcaaaactaaataatactgcatgatatcacacttatattttaaagatttaatacattactactactataactataccaacatgactaccaaacatgatgtatttacgtatataattaacaaacttcaattaaataatatatacagtgaaaacttgataaacgaagagataagaaataataaataaaataaagaaataaaataaaataaagaataaaattgaaaagtgccctttttaactttttcttattgtttacaattcaaatttcaacaagcttcattaatattcctttattctttgatactggtcttttcaattatcgattaagaatgtcttctaatggagggcatttaacaagaggacaatctagaagttcagtcaattcaactgtttcttcaacttcaaattattatgatgctcaagaaagaccattatcttcaaattctaatgtaaatttaaattcctatccctatgagaaatcaaatgttcaaacaaattctgatgtacattctagtaaaattatggatcctattgcaagtacaaatacacaattaaataaaattcaaaatgatagtgcaaaatctgatgctgaattaagagaatatgtaattgcacaacgattgaaaaatagtgaagttataaataataaacctaacttaaatcctttacaagctgccttttcctatatggatggttcaatttcaattaatgatacggttaaattaatttcatcaaatttgaaaaatttagttataacaaataaaaatcaatttgaagattcaggtacttaagactccattttctcaaatatttaattctataatgaacccatgttttcaaagtaccagtgtaccagtttgaaaactttttgtaataacactctttaacattcaaacccaccatttcaaactcaaaagagaaaatataaattttacgtcttcctttttgtggatataaaatatgagagaaatggtctttaaaaatatcaatttcaactttttccagatattattcagttttattgcatccataatagcctgtctaattctattatgttctggaaaagatatcaaagagttactttcaccatcagtaagtacaacattagaaacatttggaatatcagcaggtatatcagcaggtatatcagtaggtacatcaataggtttatcagcaagtacatcattagaaacatttgaaatatcattaggtatatcagttaaagtatagttaggtatatcatttggagtatcagaggtaccattaggtatattatttgaaaaatcaattgcataatttagaagatcaacaacatctttaaatgcctcaatttcaatatttgaaatatcatcagagcttctgctacgaacagggttcgaaacatcatcaacaaactcatcattttctttatatcagctcattttcttttttgactcaaagactaaacatgcttcttcaaatctgtagctttggaaatatattcctggataaaagcgtaatagttggcacccacaatattattgtgaatagctttcacaaacaacatcaatgattttctaagagctctgtgtaacctcttgtccgcttcagcaataaactgactactatcagcactcgtttgtaccatctcattcattatgtttaataaacacaaaagaaacatcagattgaataatttcatcaacaggtaaaagcaaagaagaaaccttgttgtgtttatttttgggtaaacttgaaattaaacatatcacttctttccataaaagtttttaatgatattgaagactcacgtcgttctcttggacctaaaattggacaaacagctaaaaatctatggaaaaatagtaaatttacattgagtttatagttttcttccaaagcagtcattcgagctccatgctctttagttactgcacttatcttccaaggtgaatttgttatccattcaagaaaggcaacagagggatgcttataagttgtgtttcctgaatattttttaaggtaccccgttaaacctgtaatgaatctaaaaacatcacctatataaataacccttgaaacaatgccatcatgaaaaaattgactttctgaataaactgtccttttagtatagtttaaattgatatcataagacggagaaaacattaaagtactcatttcaaaataaatcaagaacaacaaacataattatattactatcagcttctggataaattggaaaaattaaaacagttctcctgtgtttgaatttgatagaagtacaaggtgaaataaattctgccagaggaggtgtctccaaaaaggcaccaaccaaacttgcataggtacaattatctgatagtgagtttagcttgttgaattgggattatcctatttgtaaaatccatattagttataataataattgtattgttatttaaataagataaacattcccttatatagtaatgaaaaatgaaactttaaggcattttaattaaggcttagttgaggctttgaaattatgtttagattaaccttctcaacgccctaccataatctaaacttaaccaaaatgtgaaataggagtcataccaatcttacagttgaaatttctaaacttcattctattcaaattctttgtaaacatatcagcagccatttcatctgttctaaccgattccaaattgaaaaccttgttacctaaatgctctctaataaaatggtgtttgatatcaatatgctttgtcctttgatgatggacaggatgacttgtaagcaacttgcaaccttcattatcttcaaaaattgtaggtggataattgaatttaagaccaacagttttaagcaattgaattaaccaaagtagttctttaactgtatcaccaagtgccatgtattcagcttcagtagatgataatgcaacagtaggttgtttcttagacttccaagtaatagcacagccagacatcataaatacatacccagtaattgactttctatcaaacttatcaccagcccaatctaaatcactaaaaccaaccaattgaaaattagataccttcttataaaccaaaccaaatgacacagtacctttaatataccttaagacatgtttagcagcagcaatatgattagctcttggatctttaatgaatcttgataatgtagaagcagcataggacaaatcaggacgacaagtgttagcagcaaataataacttccctaccatgctgcgaaaacgggtaacatcagcatcagaaatagcatcaccaggcaaaaaatcagtaccagcagcaaatggagtagaaacaggattgcaatcttgcatattaaaatcaaccaaataatcattgagatagtgatgtaaagataaaccaacacgtccttcagattgatgtaaattcataccaagaaacctagaagcaacaccaagatctttcatcttatagtgagaagagagaagacctttaacatcagaaatagcagcaggattatttgaacaaattaataaatcatcaacataaagagcaacaataacaatagagccggaaaacaccttagtataaataccatattcatttgaacacctttgaaagtcagcagacaataaaacttgattgatagcttgattccaacaaaaaggagcttgttttaaaccataaagactcttattaagcttgcaaaccataccagaaggagcatcaacaccatcaggaaccatcatataaatttcttcattcaaagtaccattcaaaaatgcagttgaaacatccatttgatggatctttaagtcaaattgagctgagatagcaagaacaattctaatactttcatacctgacaactggggaaaatgtttcaaaataatctaaaccataaacttgcctaaacccttgagcaactaatctagctttgtaagtaggtggtgatgttgaatctttaatagtgaaaacccagcgacaaccaatagcacgacgaccagcaggaagaggaaccaaagaccaagtggtattcaattgatgagcatctaattcagtttggatagcagataaccaaaaggatctgtcatgtgaattaacagcctgattaaaagtagttggtaaagcagatgaaacagtagtagatgcagaaaaagcagtatgaatggcattggaacctaaaaataatgctttggaacgcttaggaactaaatcaacaatattagagagctgagacaaggacctttgcattggaacaatagcaggtggttgagctggagcaaatgctggtgatgaagtggtagatgatggtgtagtagatgatgtagatgatgaagcaagtgtttctggtttgaaacatggcttttgcagtggtggttgagtaatagatgctgaagttgtatcacttctgtaacgacgtaatggaagtaaagattcaataggaacttgatgaacttcatcataaactggataagcaaagtcattaggaatagaatcaatttcttcttcatcaccagatgaaactaatttgaaatttggaaacatcattatcttcttgtgaaataatattatcaatagcatcagaaattggaacataggcaacagtttcaggaacactaggagagttaggaaccatttcaatattatctggaacaaccccagaagattgcatcataggtgaagaagaagcagatactggagcagatgatgatgatgatgatgatggtgatgatgatgaagagcttgataatgaggctggagatgatggtgatgatgaagtagttgaatgagcatccgaagtggatgaggaggaaggtgctggtgaagaaggtgctggggattgaaccggtgaatgattaataataagaggttcagcagaattagaagcaccagatggaataacaggacaccaccagcattaccaccatagaaaatatctgaaggagaaacgtcctccataataggaatattgtttttagagtctaacattggaaaataggaatcatcaaatttgacattatttgaaacaacaacatcttgaatcctaggaataaaaaccctataagctttatgtgctggactgtaaccaacaaaaataccagcaactgagaccggtgaaaaaatgttttccctcttttcctttggaattaataccatgcatttgcaaccaaaagaatgaaaaattgaataattaggaaccctgcccatccataattcgtaagcagtcttaccattgagaacatcagatggatatctattgataataaactcagcagttttaacagcttcagaccaaaaattaaattgtaaaccagattcagaaaggagagttcttgctttttcttgaacagtacgatgttttctttcagcaacaccattttgagatgaaatatatggcacagtaagttgatgagtgatacctttatcttgtaaataatgttttaaatcattgttgcaaaattcagtaccattatcagttctaagaatactaaccttaaaacctttggatgagaactgagtttcagaaaagttgatgaattgtttaataactgaagaagcagcatatttggttgccaaaggtaaaattgaacaccatctggaaaaatcatcaacaattgttaaaaaatatctttcaccagataaaccaggaacattaataggaccacaaacgtctgaatgaatcaattgaagaggacgaattgctttaaaggtagatgattttggaaaaacctcagtcattttaccagcagaacaatgttcacaaattttaaattcagaggaaggagagaaacccaattccctcataaccctaccagatggatgacccaatctagaatgcatatttaaagtgttggcaatcaaactgtaatttgcaggaataattggtgaaaaaataaattgatataaagtagctggaaaatattcaccaataattgtaccatcttgcatataacagtatctatcatcaaaagaaaatctagcaccagtgtttctagtaatcattttgatagaaattaaatttcttgaagtattaggaacataagcaacattgctaattgaaattctttgaccattatgaccattgaaaataacagtacctctacccatgatttgtaagttatcaccagaaataccagaaacagtttcaacagaagtagcagaaacataatcactaaaatgttcaaaattcttagtcatatgaagattagcaccagaatcaatagtataagtatcaccagtatgaacaactggagaaacatgccaagcaacatcactaataccttcggaagttttaccatttgctggtttagaggaaacaggaacagcagcagtacaatttggagaaatatgaccagcttgttgacatcttctgcagataacaccctttgaattctttggttttctgtttctaggtttaggcttgttagcaataaaagcttgagcagaaggagcaccatttggagatgaagaggtagcaatatccttaagagatgcttcaatagctgataaactaatttggggatcagcagcatctaaaattcttgaattgatcgagggatcacgaaacatttgaagatataaaagacctaacaagtgatcaatggtcatgccatgagtaaattgagatctcatggtctttaaaaataataatcctttgtcaagtggcatagaggatgatttagttaacttgtcaaccattgaataaagttgacgggcagacaatctagaataatatcttctaattgctgctaataaggcagaaccagacaaaccttcacattgataattgaaaataatatcaccatcaacggtattaataaggacaacttgaagggcccggttaagataaaaagtaagttgaacaacactggggtcatcagccggagtatccggtgaaactaataaatcaccgtcagtaaaaaattccaataaaccgaacccaaaggtagctaaaatggagcaccaacatcccaattgtgataattttcagcagacttcaaagtgttaatagagctttttggacacaagtgagaaaagaagctcataacctgtttaattgaggttatcctatttgcaaagtccatattagttataataataattgtattgttatttaaataagataaacaaaagtaaaataaataatataaagaaaagaagaggaaatacaaataataaaagtgggaatacatgttcccttatatagtaatgaaaaatgaaactttgaggcattttaattgaggcttaattgaggcttaattgaggcatttaattgaggcttagttgaggcattagaaattatgtttagattaaccatctcaacagcttgaaagacaaccaaaccaaacaaatgagattatgaaattacaaaaaaaaaattaactaaacctgctaatatacttacataatcttgtttacttcaaatgaataataataatgtcaataatgataataataataaaattgaacaaaaatagattggttcttctaaagtttgaaaataaaatatgcagcaagcaatccagtagataaacctaatagtactggtactgttgtccataatccagcaaatataaaaacagattcttttgaaaaacaatgaagtaggtaatctcagtattgatagtgatgtatctagtatgaatttgaatagtataagtactgccgatgctgtgaataataataattttttatttaataacaatagtcaagctcagcttactcccttaagagtatttaaacaaacttgaatccattcgatgataaaataaagatgcatcaatacacaagaggcaaatgttttagttgaaaaaataaaatattcaatcccaaacacatatagagaagctattaaaattttacaagctgagcaatgaaagaaagctgtgatagaagaacttagttcaatgaacaaggaaaagtttaaacattagttattaaatcaaaattacttaaggtgctttagttgttggaagatgagtgtttagtttaaaattagatttagtgaaaagaaaagaaatattcaaaggtacaattgtggcaaatggatttacgcataagaaatatgctttttcccttgcaaaatttgattgtttgagattagttttttgtttatctgccatgaggaaatggaatatttcacagctgtacactaaaactgcttttttgaatggtaaattagattatattatttatttgaaagctccagatggaacaactaaaaatgataatttggtttggaacagaagttcatgttgtttggagcagtctccaaaaatgtggtatttaacagtcaaaaagttagttgatattgggtatagaaaatcaatattagaacaatgtttgttttaattttttaaaaattgatgtcatgatattgttattgttgagattggtaattctaagcgaaactcaataatacacaataatactgtattattaagttgagccttgaaaattgattagagctaagtattgctcgcaaatcagaaattagaaaaagaaacgatagtaaagattggaattctaagtacaagtagaacaaagaattcctaggtttgatatcaagtctgtttatattttgtatgatcttagttattttataagttatatatagttggttcttttaatactgttgttgttgtaaaatatgggtcctgcccaaagagtcgttagattacaacacatccttgtaaatatgggaaaatattagaataaaccattaatgatgctgatgtttttgaagaagcttcattttttttttacattaatttcattaaaatatacaattttatacagattgattacttctacgcatatattatttatgcttcatcaattcaatatatcttcatatactgaactaaatgtaaattatttctgtttgattattctcaatcttttccatctaatttagatctaataagaactaaatttttcatatttgaataacaaatatgtatctgtgatatatctttttgtaatcctaaactctggatcattcttcttgcttttgtagcattgtttgttaaaaaatataattaatttgtttgttatatttgccacataagcttctttctttgttaatattaaactaacaatattctttagatcaatttttatctctaattcttttagaattatttcaattcctttacagttgaaaaagacatgatgagtcccaccttccccttcgcagaattggcaagggtgataaaaatgggaattcaacattcctatttgtaattcaaataattcattataatcaacatggttttgattggtgattctacccaaccaaccaaagcatgcttcccaatccaattggttttctattttaccatcccaataatctgaattaaatttatccttaaattcttctttgtaaaatctttttgaaaaatgtttaaatgattcaatattgatttcctgatttttattgaaaatttctacaattttccatttttgaacatttttttccaccattgaaaatgacgatgttgaattgaaatctgtagtttcttcaacctgaaaatctgagtgaatattagtcaaataataccatccttacaaatatgggaaaatattagagtacaccattaatagtgctaatgtttttgaagaagcttcatccatgttgtaattcacagggtgttcgataatgaaattgatatttggttcaaggtcgattattattttccctgtatttacatttattattttaggttttgcaacctttaacatttcatttgaaagagtttcttcaatagtaatattacttccccatattttatgatttttatgcagaagaagattgaacggatatgttgaaattaatccatttgaaatagtgcctggtatttttatttttggtaaagttccaggtacagctctatttgataatatgtaattttcgacatatctataataacaatggtatgcataatgatttctgatcataacattaataattccttgtaatgaatgtgagattattaatgtcaaaggatgctcatttataaattttaacttctgtttaatagtcgttatataaatgaaatatgctcttttaccttgaagctgtttaccaaggtcaatcagacccatacccccatttttgtcaggttgatgccatttgattcttctaactgcacttttcagcggtaaatatttaactaatttttttttaacatgattttcaaaagaatttaaaagaggatccggaattggatcatgttgatcaaaataatagatagtggaataaatgtaagtattaacagccgctactctttgatataaatttagctctaaaaacatagttttccttagtcttgttttcaattggtttattttattataccagttgattttcaacaatcccccctagatagataggattttttttgatatctaaaattgatagcttcaattgatttatattagcaaattgtttgatattattgatacctttattattaataaaaattattgatttcttttcatttattttaagatccaaaattcgagcaaaattattaaaaattgatattggttttaatagtctactaataatatatgatgttcattggataatgacggtgatgaattgatttaatttgcaagaatccttgcagtttcaatatgtaaatgaatatttctgtgaagcataaatgtttgttgatgatgggaaataatcctatttgcaataggcataattctattagaaatagaaaagttgattaatctaagtgatgaatttgtaagactgataggacgtagatcatctattgatggaagatcttgtcgataactctttttggaaattaattttatcaatactttaccaatcttatcagttgtggttaaattgccttgaagaatataatttgccatgttggttagattcacagcagcagaaacccagttgtttttccaatctctgtaagtaataccatcagtccctggtgatgatggaccattttcatttagccttagaaggtttttatatatctcttgttttgaaaaaggtttaattaaatcatttttctctttctcagttaattgttctttaatattttcagtaaacttgtcaaatttgttatttaaattttgatttgaataaatttcatttgatgcgaaaagatttgaataaaatgagttagcatcagttataatattttcatccaaatttgcttcatttgaatgttttccaaatctaagtctaagtctcttgaagttttttgagagattagctgagatattattgaattgaggatcattaaaatcaaatcctaattctttagatgatactttttccttatatgaaggtaaatgtttcattatctgaattactttatttgttttccagcgaactctttgcatatatgcattataatccattgatgtgtttttagtatccagaatctcattggtgaaaatgtatttatataattgtttattttcaataatgtagtcaggaattgatggtattcttttgtaaaaattatctttattaattatattattattagaatttgaattgatatctgataatgtacatactaccggtctatgtgttgtaaacggtagcttttgatgtactcaatatttaaaattgatatttcttagcagattgaaggaaacatggaaacggtctagccgattatttgttccatttgaaccgtggttggtgtaacatatacttcttctattatttggaaggaaaaaaatatcatataaattattttccattaattgttgatgaagaaatgattcaatacgatttaaatttgttgcttccataggatgtgtattccaatcaccacaaatgattagattattttcaccacgagataatgatgataaagttgggcataatgtgtcaataaaatcttttttgttaatgcagtggaatctgttatcattaacattattgtaaactggtacataaacagagatgatagttaagttttcttgtttgaaatttatttttatatcacagacataaaagtttgcaagttgattatcgcgattatgccttggaaaatttctattgaagaatggtaaataattgctgttcgatgttgaacagattgaatcgcaattttgaaatcgaaattggataataattgttgaattgaagataattcagttgattgatttagatcaaattctgtaagacacataatttgaatttttttattttttgcataatttagaatatgaattaatttagaaggactagttgccttctgaatattaaaatttaaaatttttaacttattcattatgatattttatattttttttttatatatttttatattttattaaacttgaagaattaaatgaattagacttgtgagtctaaatccatttgagatttctttttttcaagtttctcttttctttctaatgccatttctatttttttagcatctaataatgtaccagttgctacactcttaccttgtttagaagattttactagtgttctgacatttctaggttgagttggagtttttggcatacttcttgtagtttcagcatgcttagtttcaacaaccatatcttctatctcttcatcactatggatgttttcaccttcatttggaatttctggatcatccacatttgccaatacttggaaaggattgaccacattatcaacgttactgactattgatgataatgaatctgacctagataagttcttaggtttagatggaatagagaagccatctgaatctactttgtcattattgataacaacagctgcatcttttttttacattaatttcattaaaatatacaattttatacagattgattacttctacgcatatattatttatgcttcatcaattcaatatatcttcatatactgaactaaatgtaaattatttctgtttgattattctcaatcttttccatctaatttagatctaataagaactaaatttttcatatttgaataacaaatatgtatgcttttttttttccagtcaacttctgtattactataaatttataaaagatactataaatatttttttctaaaataaatgctatataataaaacattcagtccggttaagggaaaggaaaatcctataaaacccttttgttatatcgtaaaattaaatgaaaaatgaaaaagaactcaaagattaaatgaactgatagagcttgtaggttaagctttgttttaaaaaagaactgtaataaatggttaaattgttaattattatgtgtggttagtttgtaaaagaaaagtgtgaagtgtggaaacctaagaataagatggaagccttaccggtatttgaaatcccagtaagtatcttctataatattctcattttcccattgtaatatttcaggtctcttggcataagctaccctatgacaatagacaagaaatttaatgaaagtgtttataaatgtaaatgacgacgtttgtggtttttgcggacaaattaaaatatttgtggagaattgtggtgtattttgttgatttgattggtttttgataaatttgaatatgtggatggtgatgttgcattcattaataacatgtctaattggcgtcccgttgaatggaaggccacatagacagctactgtaaaatgtattgtttagtaatccggtgttaagtgcatataggtagtaataatcttggggtttggtgaagatatgttgattgatgttgttaaagaagtttttccattcttggtcaccaagctgtgcattgttggcccaagttttagtattggttgttgagattggtaagtctaagcgagactgaataataaatagtaatattatattattaagttgagcctcgaagaaccaattgaattttagtattgctcgcaaatcagaaaagaaattattagtcaacgttggaattcttagtataaataaaacgaagaattccaaggttgttaatatatttcttttatgttgttttcttattacttttatatttatttatattttatttagtttatttaactaactattactgttgtttattatggacgcctcatctagagtaagtagattacaacaggttatgggtcaaatctcgactctattcccaaaagatagctctccaaaactatctgctgctgttaattatccgaaatgggaaaactatgttggcagaatgttggccactgttggtgcaggtgttgatgtctattttgtttcaggagatctgatgttaactcctgacactactgaagttcaaagtgctcaaatccaaaaccttttaaccttaattatccaaacaattttaaattgtactgttgctccatctatcctggataagtttgaaacggacgctgctgttgggtttgaactacttgttttaattaaaagaagatattcacatatatctgttagggaactttccaatcttgttgattctgctgttgatgctagaactaagggttcttctcctggtgaagctttagccattttcaaaaatgtttgttatcagtttaacaatactcctgaaattaatcaaatgatgggtttattttatctgaaaatgtttaactctcctttagccaaagccaaagttttagattgtgctgcacctgatttatcactatcagctgttgaagcagcacttgatgattttagtccaactgttgctcagacctttatgattaaaaacaataaaaataaaggtaagagaaatttcaagagaactcctgatgaaatcacatgtcttagatgtcaagttacaggtcattatgctagagactgtacagctcctgctcctgcatcagctacaacttcaaaaaggggtgcttcagcctttactacctccacttccaatggttttgcatggatggctactactgttaatctcactatgtctgataaatatttgttagatactggttctgatatcaatattactgttaataagaaccatttttttgaatttgaaacaattggtggtcatgtttctggtattaacgacactcaattggaagttaaaggaattggtaaaatcaaattagttcatccttcaactggtcatgaaattactttatctgatgttcattacgttcctgatgcaacacaaaacattttatctattagacaagcatctcaatttggtgattttaaattttccaaacacaaagttgagtttattccaaatggtactaatgaaaatgtacaaattggttctgctgaaggttcattatatttttcggactatattccagttgttgctagaacatttgcagtcaaatctaccaatgttgaactaatgcattctaaattaggccatccatcacctgcaactttgaaatcaatgggttattcaggtggtccctctgttgaaaattgtgtctcatgtgcttctggtaagatgacaaaagtttatcctaaatcctcaactactcctccagcaagtgctccacttcaattgattcatgctgatgtttgtggttcatttccagttaaaggtactaatgatgaaaaatttttcttaactattgtggatgattattcaagatggactcatgttgttccaattcaaaagaaatcaaatgttactaatttaatcaagtcttttattcaaactgctgaaaatttctttgctgcccaagggtataaagctgcaatcttaagaactgataatggtggtgaattttgcaatgatgaaatggatgcttattgtgctgaaaaagggattactcatcagttgactgttccttataattcatctcaaaatggtgttgctgaaagaaaacatagaactatccaagaaaaagttcgcactttgctgttctcctctggtttacctgaaacattctggtctgaagctgttaaaactgctgaatttctaatcaatagatatcctgctgataatctcaatggtaaatctccttttgaaagatggtatggctacaaaccaaattataatattattcatccctttggtgctgcttgttatgttttagttcctcctgagaaaagaacttcttcatttgctcctgtttcagtttctggtattttagttggttttagcacagttcacaaagcgtacagatgttttattccttccttaaaagatgtggttatctccaataacgttaagtttaatgatacattatttccatataagaaatttgcaaaattaccaatgtccaatactttaccaccttctgatgttaattttggtgctaaaactggtggtgcagtactaccttttgctgctgatacttcggttaatatcacagattcaagctatgttccatctgatgctcctaatactacatctaaatcaaccagatggaatacttctgaagttagatcctcaccatcaattgcatctgttcattcttcacctattgaaattaataatactaattctcaggtcaataattcaactgatgtttcaaataatgattataatatgaacagtgatattcaatatgaaactccatcggttgcctcctctggtatccattcggatgcttctgttatgtcctctattgttgatcactctggtattctttctggtgttccttctggtggtccttctgttgttccttctgttgttccttctgttgttccttctgttgttccttctgttgttccttctgctgttccttcggttgttccttcggttgttccttcggttgttccttcggttgttccttctgttgttccttctgttgttccttctgttgccccctctgttgcttcatctgttgttccttctgttgctccttctgttgctccttctgttgctccttctgttgctccttcgactgtttcctttgctgctccatctgttgtgccatctgttgctgctccatctgttgttacttcacacgttaatgctccatctgttacttcttctggtgttccatctggtaattttccatctgttgcttcgcctgctgcacaatctagacaagcatccactatctctagattgggttttgatcaagcaggagtcgatcttgattatattgatgatatttattctgaaatcgctgataatcttccaattaatgctgaattacaaacagatctggaaataattaatcaacttgctgatgcaagttcctcttctccattagtcagaacaatttccgctgttacagataccaaaggtccacctccaaaaagagttgaaaaatttcttggtgcaatttttaaagttattaaagaagcttctacaccttcagttacagaatttattcctacaacttataagcaagctatggattcacctgatgctaatttttggaaggttgcaattaagaaagaattggaagctcatcaagcaaatcatacttgggagttagtggaactacctgcacacaaaagagcaattggttgtcgttgggtttttaatattaaagataatacaactccaccaatgtttaaaggtcgtttggttgctcaaggattcaaacaaattcagggtgttgactatggtgaaactttcagtccggttatcaggtatgaaagtatcagaatcttatttgctttagctgctcaattcaaattagctgttcatcaaatggatgttactacagcatttttaaatggtgatttgcaggaagagatttacatgaaggttccagatggtgttgatgctccagcaaataaggtgtgtcgtcttcgtaaaagtctttatggcttaaagcaagctcctctatgctggaatattaaaattaatgatgtcatgttagcagctggatttaaaaggtcattatctgaatttggtttgtactcaaaggttgttgatgctgaagttgtgttagttgcattatatgttgatgacttattgattttgtctaataatgtagcattgattaatcaagttaaactgttgctaaattctagtttcaagatgaaagatttaggtgtggtgaatacatttttaggaatggaaatttctcaaacttccaatggtatttcccttcatctaaataaatatttcaataatatgttgcaagattttggtatgactgaatgtaatgctgtttctacaccacttccttcaaatattaatgctattgatgatggttcaagattattagaatcagatgctactgcttttcgcagcatggtagggaagttgttatttgctgctaatacagtgagaacagatctcgcatttgctgcttcttatttgtcaagattcatcaaagatccacatactaaacatttgagtgcatgcaaacatacattaaggtatatcaaaggtacaactaagttaggtttgatgtttagagaaggtagtgagtttgagttagttggttactgtgatgcagactgggctggtgataaagttgacagaaaatcaatgactggttacttatttaagttgggtaattcaattatcacatggaagtgtaagaaacaacaaactattgctttatcttcaacagaggctgaatacatggcattaggtgatgcggttaaggaagcactatggattagacaattgttgaaaggtttaggtttaaaagggaaggcagcctcaactatatatgaagataatgaaggttgtaaaatgttgtcagaacatccaattcatcatcaaagaaccaaacacattgatatcagacatcattttattagagatcatattcaaaagaatgaagttgagattaaatctattagtacaaactacatgattgctgatatgttaacaaagagtttaaatagggtcaaattcaatgaaatggttggtatggctggaatggtgaagatgtaatcgatttgtgagcatggtagggtgttgagattggtaagtctaagcgagactgaataataaatagtaatattatattattaagttgagcctcgaagaaccaattgaattttagtattgctcgcaaatcagaaaagaaattattagtcaacgttggaattcttagtataaataaaacgaagaattccaaggttgttaatatatttcttttatgttgttttcttattacttttatatttatttatattttatttagtttatttaactaactattactgttgtttattatggacgcctcatctagagtaagtagattacaacattggtgttgatatagttgatgttttggtggagtttggaagatagatgattcaagtcctgataaagaatatttgaaggttgttgggatttatttttattcaaaaatcgattctgcaatttggtgtgtagggtattgttgtatgaggttatggtttgaggctggttgatggtgttgcaggtgatgtgatcagtcatttccgactttacgtaatactaaaaaaatatttataaattttgacgcatactttttttgcataacagctcttatggccaagttggtaaggcgctacactagtaatgtagcgatcctcagttcgactctgagtgagagcatgagttatactcagcgcaagtggtttagtggtaaaattcaacgttgccatcgttaagcccctggttcgattcctggcttgcgcagttttatttccgagatagtttagtggctagaatttccgcttgtcacgcgggagaccggggttcaattccccgtctcggagttttttattttatatttcttttatgagtttgatagtagaaaaaattattcttgattcaattttttataataggaatcatcgatgttttataatcttttcccttttttttccttttgaattgattagctgaaagcccttctattattaacgataataaaatttaaaagtgaattaaccatcagacgttattagatttcctctcggtttatgaacgatgtctaactctaatttgaatcctatggctgaaacagtcaacaaaccacaaacactgaaaccttcaaaaggtattttcaccaaaactataagtcaattacccaaatcattatttacatctaacaatgtctctattaattcgaaacgtagaaatatgcctttaacatttttaccaccaagcactaactctccactttttgtttataatactaattctgatcaacgatctttcctgagtttatgttcaggttctaatattgatgtttatgaagatataggatctgagaatgttagaaatgataatgaatctgtttcaacttttagatcattaccatcaacactggaagggaatgatgatgaaattgaaagtattcatcaatggcttgatgatgaaagagaaagaaggagtttgatcaataatgaagaaaatacagaattttatggtacaacaaatgtatcagatgaagatattatggtacgagccaataaattgtaccctgatgaagatcattttagtagaaaatcttccattattagtattgaaggaatattgaaagatgaagaagaggaagattttttaaacgaaattacaactacaagaaaggaagtacataaattattcagttactgtttaccattgactatcacattctttttagaacaaatattttctttagtttgtgttatatttgcaggacgtttaggtaaagaagaattagctgcagtttcaatgtcatctatgacgtctacaattgtatttgccatatttgaaggtatagcaacatcattagatacattatgtccacaagcttatggtgcaggtcaatatatgcatgttggaattcatactcaaagatgtattctattttctttagctgtgtttatacccgcttcaatggtttggtattttagtggttatcttttatcatttattataacagatgaaaaagtcataatgttaacacaacaatttttaagaattcttatattagcaggtccaccatatatttgttttgaaaatggtaaaagatttctacaagctcaaggaatttttgatgcaggtacttatattttatttattacagcaccgataaatgttttcttaaattggcttttgatatactcagatacttttggtgtcggtttcataggggcaccaattgcctctgttataaatttctgggcaatgtttttattattagtattgtacgtcgtttacgttgatggtttatcatgttggggaggatttacattggaagctttaaatcattggtatgatttatctaaacttgcaattccaggtattgttatgattttagctgaatatcttgcatatgaaattctcacattatttgcatccaaattaggtacatcagcattagcttgtcaatctgcactatcatcagttgtttcattattatttatgtttccattctcttcttcagttgcatcttcaactagaattgcaaactttgttggtgctgaaaatattaatggtgctaaaattgcaatcaatgttggatttttatcagctattgttattggtttaataaatttttcattcattcattttggtgcagaatatattgcattactatttaccaatgacgaagaagttatctcaatgtttatcaaattatgtccattagtttctatttttttgatattcgatgcaatatcatgtgttgctaatggtgttatgagagctttggcaaaacaacttataggcggtacattaagtttagtaggttattacgttattgcacttccattagcagtatttttatgctttaatatggatttagagttactaggtttatggataggaaatggaactggattacttttgattgcatgtactgaagttttcattatttataatgttaactggaaaaatattattcaggatgctaaggaaatatctaaaataaattctgatgtataatgtctgatgtataatgatttaaaaacatgtatacttttatagaaataatcgtaataacaatcattattataatcatgaagacatatgtgtaaacaataccagccatttggaagtggttgaggagttgaagatgaaaatcaaaataaattacccgattaggaaaccagccacttcatgaaatttgtttgcgaggcttgtcactttatgcaagtaagttgttgacgttttacttcttttgttcgtttgtttacatgtgccctgttattcttgatcagtgtagatcagccctctgatttcgagtatcgtcaatcatgacaatcgaactgtttttgtttctgtataaaaggtagacgagatattaagtttttcgtctattgaaattatttggtactctcaaattaaattaaattaaattaaattagttcagttaaattagttttaaaatatcattaattaattcattaaacaaaactaacatataaataaaaatatcaaaatgaaattaaatatcttactacttttggcctcttgcatgagcctttcaaaagctgaaaatgcttatgttcctggtgataacttctcaactttcacaccaacagggggatttgcatctggtgcaacacttgattatactgcatcatttggtattgcaattaaaccaattgtctcatctgttgcattatcatcagtaacaacaggagaacaaggtcaagctgttgtcactcaaataggagacggtcaaattcaagcaactacttcaactccacctccaactttaattacacaaattggtgatggtcaaattcaagctacacaggcaatagaacaaacaactgcacctgtagtaacacaaattggtgatggtcaaattcaagcaactactttaactactattacaagatcaactacttctactaattcagaaacatctaatgatactgatggtgttgtcactacaaaagtcactaaaattgttaaacaatttgttactgttccatactcatcaaccgaatcttcaacagcttcttcaactgcagaatcatcttcatcatcagatgatatcaccacatatataactgtcactccaactgaaacagtacttgcaacagttacaacacctaatcttccaactttagatcctactacagttattgttgaaaaacgtcttgttgaagaaactgctactgtctttttaaataaacgtgatgttccacaatcatgttctagtgaatctgcacttacaatgactcttgaaaactctgtcttacgtgatgctaagggaagaattggtgctattgtttctaacagacaatttcaatttgatggtccaccaccacaagctggctcaatctatgctgcaggttggagtattgttgatggtaaattagctttaggtacaagtactacattctatcaatgtttatcaggtgacttctacaatttatatgatcaaagtattggtttacaatgtgttgcagttgaattagacattgttgaatttcgtgattgttaattttattgatttaaatatagttgaattcccataattgttattattgaattagacaaatctattcacagcccccatttcatgtcaattctttatccaacaaatccaaacacagccgaactaaaaattctctatatattcttatataaaacattttatttacaatacttttctagcttttttataactgttatttgatttctttcattatattaacaacttaattaaaacgatataaagtaatatcatatacacgttttaggtttattataataatctactaatgtactttttaaatttgtaaacaatttataaattagtttctcttcttaaagttttttttccccttacctttactgtttttctttgaagaagatttattgattctctttatatcgttttcatgtctatctttactggttttcttataactacgtgaagaatcaccggcatcttctaaagcttcttctctctttcttttcttactgttcattttctttttagttttacctaatgcttcaaacactttatttttttcatccttcttttccttttcagtcataaaccaagttctttttggcctactttcaatttcttccttatacttcaacatattttcacctttctttaattccatttcagcagctaagacagccttttcttgtttttcttcatcaataatttcttgaattaaatcatttttactctcaaggattttatttacacgatcaacttcatcccaatcagcattacgacctaaagctttaccagttttactttcttcaacatttttaataacttctctaacaatagcacgctctcttttagcctctccaacaaaacttatagatataccttctcttccagctctggcagttctaccaactctatgtaaataaatttcatgagtctttggcatatcaaaattaataacaacttcaatttttggaatatctaaacctctagcagctaaatctgtacataataaaatattaacggttgcctttttaaataatgtaacactggacaatctttgttcttgtgataaaccaccatgtaattcaccaactctcatacctaacaaaccaagtttaattcttaatttatgacacatatcctttgtactaacgaaaacaataattctttgcttttgatcaagttttgataaaatactatataataaagcaggtttagattcttctctttttctaactctaacgaattcttgtaccaacccactagctgctgtcttaggtggatcaatcataatacgaacaggtttatctaatgaccatgcaattaattgtttaattgaagaattcatagtggcagagaaaagcattgtttgtctttttcttggtaataattcaacaatctcttgcatttccttttcaaaaccttcttcaagcatacgatcagcttcatccataacgacaatttcaacactatcaacagagaaagaaggtgaatttctaatatgatcaatcaatctaccaggagttgcaatgacaatatcaggacgtttctttaattcttgttcttgttgtcttaaatttaaaccaccaacagctaaaccaatagttaaacttccaatatattgtgcaagttttctaccaacatcagcaacttgaattgctaattctcttgttggtgctaaaactataactcttgttttagcaacttttgaaggtttatataataatctttcaataattggaatcatataagcagcagttttaccagaaccagtaacggcacctgcaacaatatctctacccaaaagagcaattggaattgatgcagattgaattggagttggtttactataattaagagctgtaagtgatttaataattggacgagataattgaagtgattggaaagttttatgaacttgttctcttgctgcatcaccttcattttcatcataatattctgcaatagcttcagcggaatcttgttccttttcatcttcagatatgttatcatcattctttaaaactaatttacgtttttcatcatcatcatcatcaagatcatcatcagattcatttgcatcaccattttcttcttcattttctttcttttcttcatcttccttagctggttctgcacccattccaaaaccatccattgctaattcatcatcatctaattcgacatcatcatcactagcattttcttcttcttcttcttcttcttcctcctcctcctcctcatcattatcttttgcttcttctccttcctcatcatcatcatcgtcttcattatcagacccagaagctaaatcatcatcatcattgtcattatcattatttttactattatcttttatatcaatacgaccagttaaaccaccctttcttctaataatatcatctaaatcaacatctttcttaatatcatccttattgttattactattaacatcaaaattccaaccatcaaaggcatcagttgaacctaaatcttcaactgaaaaaatataatcaggatttaaatcttttgaaactttaacttcattattattttcaatttcttcatcagaatcaatttcactatcattagaatctttctttttacctttcttatttgatttctttgatttctttgatttattctttttattatcattttttgttaattctttatcagaatttttatctttattatcaatttcttcttctgaatctaaatctggaacatcagattcagaatcggaaattgtcggtataaaatccaaattaaacttagagctagcctttttattactagtgtttcttttagtagtaacacccatattgaattgcttattagttcttaatatatcaattgaaataataattatttattaaaggaaaagtgtctaacttataaaaatttttttttttcacagtgacatgaaaaattaaaaaaatatttcgcaacttttcattattgctgtaacagttttaatgttctataattctataaagatatatgtaaatgatatgtaaatgatttattatactactaatcataaaagaaattaacactgagtgaactcatatcaattttattattagtattatttgcgtttttatcattattactattattaatgttaatttcatcatcagtaaaatctaacatttgtgtacgaactctaatatcttctaatgttctaatatgttttctaactgtactaccaactccactatttgcaaaaaattcttctgaaattgatagtttcatctctgcattctcaatattaacaatgttatcagatttaatattattatcaattttactatcagcaactaatatacgtaaaccatcaacccaaatatcttttaattgttttgtatcaacataaaatgtaaatataccagttttagtaacaacatcaattctattaacattcattctttcactttgaatactaattaaacctgtatcatcattattttcatttaaattttcagatataatattaataatatttcgaaattcaataaatataccatctttatctaaatttggagtttgattatttttaactggttttttattaaattccttgtaaacaatactttgagaatttgaatttaatgtaagataataataagttttatcaattgaatctaatggattattaacatagacccatgaacctttacttaattgtgaaaatctttgatcacgaattaatgcaataacttgattatgaattaaattttctaaaggtttaatttcatttgaccacataattgatctctttaattcaatattctttaattgtaattttttaattttatcataattaaaattatcaactatttctaataatgaagatacatcataatctttatcaataacagataatttagaagataaccaatcaatgactacttcaaccatattaataactttatcagtatcattattttcaattttagcaccactaaataaccaacaacgagtaccaacatttaataaactaaaccataaatctatattccaaataccgaaaatttgatttaaattattatttttaataatatatgaactaattgatgaaataaattttaatattgggaaagttgaagtcatattacattcaactaaaattttctttaatgatctctttggttgttttaaagtaccaattaatgataaaattgataaaagttcaatttgattattaatatcatttgaataatttaatgtaataccaacttcttttgataaattacaacattcaatccaaataaaattattttcatcaaattttttatttgataaccatttaaaagttaaatctaaactacctcttaaacctgtcataccttcaatttcatcaattcctttaataaatgataatgaaccgaaaaaattattaattgaaagtgaacgtaaaacattaaataaccattgttcctctaatactaaagattttgtatcattaattgttgaaccaatagtttccattaatctatataatactttagcaataaaatcaacaatatttaaattcattctagcatctgcaaatgtaattcttgaagataaatttgaaaataacacatcacaccttatcttactactattattattattattattagaattattattggttattggttcacataatacacttaataaagttttaaacataccctgtttcctagttttaggaataacaccagctaaataagttaaacaaattcttaaaataccacgtaatacttcaacaggtaaattatcaataaataataaatcaaataatgatctaaataatgaagcatcaaatagggagaataatttatctgattttggaacataatctaaagttttagtgaaaatgataatttcatttaataatttggatgataatattgtatcatttgttataatattatttgatgaaattaatttaattagatcatcccttaatgaagagatatataaaattgctgtttgttcatctaattgtgttgaagcaattggaccttgtgggggattagacagtttcaactgtttgagatgtttatgtatagtactataatctacagacattgcctacaagaagaagaaagaagaaagaagagatattataatatatttgtgtccctcacaatttttacttaaagctttattttattttatacaacgacactttcaagtatcttatcaattgtgcctgcacttacttcaatgtccttgatcttatcattgaagaagttaaggtctctacgtatctgttgaactatctcatctttagttccattggtttgttcattatctaatatttcattgtatttcttaattaatactatgacatattgttcaaatatacgtttcataacattatcgtattcttcccttggtaaatacctttgaacacttcttgcaattgttaatgtatttttaactattagatccatataggaattgacttttagttttaattctttgtgtttgatcgtttctatagcgtctttagtgtcttcagtgtcttctttggtgcttacttctttggtttcttcaccttcttcggattctatttctttagtttcaccttcttcggattctacttctttagtttccacttctttagtttctacttcttcaataccttccaatttatctacactctctttcttactctcttccccttcctcctcattatcttccacatcttcatctctattaacaaattcttcaacattaatcctatttaaaacagatccaacagtatctctcattatactaactaatttatcataaagatcaaccacttgatccttaaataattctttaacttcatcaaattctttaattatatttttcctaacattaattataatttctgaattattattattattattattattattattattatcaatttcagaaagacaaactctactaatatcattaactaaaatactccaaaatctacaaacttcacatgcaaatgctaaatgttttgtagttatatgttttaaacctgcagttttcgatgcttgtgcacctaaaattgattgatgaatctttaaattaattgcctttaataattcaggtaaataattttgtgaaattatattatttatcttattcttaaataaatgaattaataataaatatgctttaattgtaattaatataatacccatcgatgatggtaaaatataattttgtgaatgtaatgtaagtgatttccttaattcggtagtattttccttatccttttcttcgttttccatttcttcttttttattaatattattaaaatcaattgataatcctttagtccattcattataatcaaaatcaccatttgatgcattaattattaaatctaatatattttgtgtattaattggtaatccttcatctttccaaatttctaattcaattaattgaattgattttttaagagattttttatgaaattgttgaataaaattaaataattgtttattattaatttcttttaaaattgattcattaatcataccatttgataaaatttcacattgatttaaaaaattaacatttaatttatataatctaataaaataatttaatggaatttgacaattttgtaattccctaattttaaataattttgcaattcttctttgaattgaattaattgttaaactaattgaatttgttaaatctaaatcattaattatatcaggttgaattttcaaaatttgggaatcaaaattatttaaaacatcaattgaaattgttaataataaatttttttgaattattaatcttctaaatgattggaaaaatttagtataattatttataatcattaattcaaattcctttggagtcaaatttttaactaaatcacttaacattaatgcattacttatattattagtaatattactctttgattttgaatcttcactaatattatcattagtatcatcaccaatatcattttcttcattgttattgttattttctgatggtaaatttgatttaaaaattgattttaattcatttgagaatctttcttcatataatttaaaagccgaagataattcaccacatctagttaaacctttaagataaatttctaaatttgatttaaattcatcattaatttcaagataacttttatcatcatcatcattagtattattattattattactactattttcatttgatattaatttatttaaaactaaatcttcatttaaattttcataaacattacgtaaatcatcaattaaataattggaaaataattttgcataagatttaccagtatctgatattaaatttgataataatcttttcaatggtaataaagcaggtaatttatttaaatctttcaaagggtatttccaatttaatacaattttatcaataagtggatgatttggaacattacctcttataagagcgaaaactgaatcaattaattgtaaagaaatttcataattaccattataataatttgattcagctaaatcagcttgaattaaaattgtctttatctgtaataataattgtttaaatttttcaatattttgatattttgtaattaaattaattaaatttttagaattttcaattttattttcattaaaagtatctaaattattattaaattttattaatttatttgataataaattggaaacattatttatatttttcaaatcatccaaggctgaaaaaaatttatcacttgattttgaaatttcattaattaaatgaatttcaattatatctaaattagaggataatttttcctgtaataaatcatgatcaacaattgtattagtaccattagtaccattagtaccattagtaccatcatcatcaataagtgaagaaaatttagtaccatttataactttattaaatattttaggattatctaatctaaaatcatcattgaaataaaaatctggtatatttgataaattattgaaatccaacattgcctcttgttcctcatttaatggattaagattatcaccactactattattactatttaacttatttaaagatgaataagttaaagattttgaagattggaaatcatcaaataaatcatcaattgattcaatataattaataaattgatcaatttcaatattatttggtaattgagataatttaattgaaggtatatctttaattgttggaccattaagtgaaataactgttgaagttgaattaattgaaagtaaccccgttgttgttgattttaatttataattaacatttgaaatcaattcatggatattattattataattattataataattataattataattagacttctccaaaagagagtcctcctcccttagagatgatacagttatacagttactatctatatcattcattactcttactcctactctctctaccaagagaaagcagtacagatgataataaagacgaaggcaaaaaagtgaaggctcatcgacgccacccaaaatgctcagctaaagaaaagaaaatgctcagctaaagaaaattcgagaaacttaacatttaactagtgacgtgtcttacttattgaatttgacacgacatcaaccattgggaaacttgtttatatttaaatgaagggcgttttctcttatttactttatttcttctttctgtcttctcttttatcaaagatagtaagtatataacaatgaggaaatctccattctcaattactgcatttttcctatatgcagttctattatttattttaccattcgtttctcaaaatttagctcatgctgataccgaaaattatggtacagttattggtatcgatttaggtacaacttattcctgtgttggtgttatgaaaaatggtagagttgaaattttagcaaatgatcaaggtaatagaattactccttcttatgttgcattcactgataataatgaaagattagttggtgattcagctaaaaatcaagctgcttcaaatccttataatacagttttcgatattaaaagattaattggtcaaagatttagtgataaaattattaaaaaggaaattaaacatttaccttataaaattattgataaaaatgatagaccaattgttgaagttaaatataatggtgaagaaaaacaatttactgctgaagaaatttctgcaatgattttaggtaaaatgaaatcaattgctgaagattatttaggtaaatcagttactcatgcggttgttaccgttcctgcttattttaatgatgctcaaagacaagcaactaaagatgcaggtacaattgcaggtttaacaattttaagaattgttaatgaaccaacagctgctgcaattgcttatggtttagataaaggtgatgaagaaaagcaaattattgtttatgatttaggtggtggtactttcgatgtttcacttctttcaattgcaagtggtgcttttgaagttttagcaacttctggtgatactcatttaggtggtgaagatttcgattatagagttgttagacattttattaaaatttttaaaaagaaaaataatattgatattagtgataatccaaaagctttagctaaattaaagagagaagttgaaaaggcaaagagaactttatcaaatcaaatgtcaactagaattgaaattgattcatttactgatggtattgattttagtgaaactttaactagagctaaatttgaagaattaaatatggaattatttaagaaaactttaaaacctgttcaacaagttttagatgatgctaaagttaaaattaatgaaattgatgatattgtccttgttggtggttcaactagaattccaaaagttcaagaattattagaaaaattctttaatggtaaaaaaatttctaaaggtattaaccctgatgaagctgttgcttatggtgcagcagttcaagcaggtgttttatcaggtgaagaaggtgttgaagatattgttttaattgatgttaatcctttaactctgggtattgaaacaactggtggtgttatgacaactttaattaaaagaaatacaccaattccaacgaaaaaatcacaaattttttcaactgcagttgataatcaaaatgctgttttaattcaaatttatgaaggtgaaagagcaatggttaaagataataatttattaggacaatttgaattaactggtataccaccagctccaagaggtgttccacaaattgaagttacatttacattagattctaatggtattttaaaagtttctgcattagataaaggttcaggtaaatctaattcaattacaatttctaatgataaatcaagattaactcaagaagatattgatagaatggttgaagaaggtgaaaaatatgctgaacaagatgaagaattaaagaaaacaattttagcaaagaatgaattagagaatcaagcaattagtttgaaaaatcaaattaatgatgaagaaagttggggtgcaaaattaagtgatgatgataaagaaactttattagaagcagttgaagaagcattaaattttgttgaagaaaatggtgaaactgcatcattagatgaatttgaaactgaaaaggataaattattaaaaattgttaatccaattgtttctaaattatatgctaatggagattcaccaatcaatgatgaatttgaagatgaagatgaagatgatgaagatgactgggatcatgatgaattgtaatctaaatcaaatatttaagtaatataaaattaaattcttgtgtattaaactaaactaattaaatctattatgatatttattacataatcacatagtaaaaatttcttttttctgttaggtttcctatacatgaacatgctgatgctatactaaatttatattgtgggggatcattgttattctttcttgttgaataaatacaatggacaatcagaatacagaggaagggataatgcttcgattgaagaaacagaatcctacatttgatataccggatgaagaaataaattcacagataaataataataataataataatagataataatagatgataataaacccacacaaaaggacactacaaagttagataaaaagataacatcaattaatgtttatgaaattttagataatttaaataaaattaaatcactaagtgaaattaatggtactatatcaatggcaattttatcatttttcattaatgaattaatttggcttagtgaaaaattagaaaatggtgaaataaataataaagaaataactgatatagtatttggtaatgaattatggaaaaatataataaatgataataatattaataataataatagtaatgatgaagagaaagatgataataaagaaacttgataataatactggtaaaacaattgaaatttgcaaacctatatttgaggaaataatagatagaaagcaaagattaaataataagaagaaaatggaaattatatcaaaatctcaagaggaactgggtatttcattaaggaaaagttctaaaattttttcaaattttgaagaatctaatgattcaataattgataatattgaaactaatgatattgaattatatgttagtgaaaaatttggtaaatatgagaaatgtttaattaatgatgaaacttatgaatggatttcaaggaaattttatttgaaaagtgctccaaatatggaaattatgaaatatattgaaagaattaatacaaatttagaaattagtggacctgttggattatgtgctggatggtttttatttaaattagtatttaatattaaatgtaatgaaaaattaagtgatgcaatgaataataataataatgatggtgattatattaaatatgaggatagggatgataattattgggatacgagatcattcccattatcattaggtgaatcattcaatgttaatgggataaacaatgaagaagaggttaattcaattggaatgaatgataaagatgaatcatttaattctgttatatcagaagaagaggaagggtctataaataaggaaattaatttaatgaaagttaataaattaaatgcatttagattaatacttacatcaattagaatttcaagtaaattaattgaagataaaaattttagacaagaatattattgtaaagtaacaggattacaaaaattagaagatttatttagattagaattagcaatgggatatggacttgaatgggggttatttactaatgagtatacattatggagatatttatttcatatgcaatcaattgcaagaggatgtaaattattaagagatagattatgtaaatagttaatataatatgtaacagtaagataagataagagaaaccctgataaaagaataattttaaaattcgcactataaaaggaaacccatttcccagtttttttaatttaagttcttttcaacaactgtttcttttaacaagtggaagatgtaatggtaattgtactgttattttaatcatcctcttctcattattaatatgtatttgtgtgtgattatatcctgatgaatttttgatatcttatatgttttttctggcatctctaatgttagagcaacaatttgttgttcaatgaatacaaattttgactcttatctgaaataatcacattcataatacttatattgtagtttcttacttattaattatacaaagataaatacttattcttatttattatataatcatgcctttgtttgctaaaactaccaaatattataagcaatgcatttttaagtgaaatactagctaacctttttcattataattatagtttatcagctattgctgatactatcagttaactgatctttatcaacaatgattcatgtacaattcacttttgtatcataactacctttgatttcttaaaataattagattattaaatctatggagtccaaagtgcaccactattaccaccatctctacgtgaagcaaaactatcagctgtaataacagagttattttcagatttattggtcctttttgtattatcattattattattcttagcaggattcttgtttctatttctattcttatttctatttctattcttatttctgttattatttctacccttattattatcatcattagacttcttttgttcagttgtatcaataaatgaaccagaatttggatcaaataataatttagatttattaccacctgaataattatcaaaatctttttgaatttcatttaatgttttaacatttaatccaaaacttttcaaccaaattgttgttgttgcatcttcacatataatatcccaattaattttaaattcatcaggtaaatgtttattttcaataaattgcttttgaatacatgatctaataaaatattttaatctaatcggaacaattgcctttccatttgattcattatcaatagaattaccattactattattattattattattagtattattattatcattatcataaaatccataactgttttcaatatcatcatttttcgacttcatcatattaaaagtacctggaatattattaccaaaaacaccaactaattttttcctattatcatgattaaattgaccctttgaagaaaatccattgaattggcttttggtaattcacttaataatggtgttgatcttctataacctgatgcaattttccaatctggtccaatactatccttactctctaaaataaatgaaactaaatttggtaatgaatctttcttaactttagatgatgataatgatgatttctttgatttcattctattataactttcaaaatctgtataatcttcttcactttgatttaatcttctttgttcctctttatatcttttaattgcatcactaacagtatcattatcatcattatcatcctcctcttcctcctcctcatcatcatcatcctcatcactaaatgaatttaattcattattatcaaattgaacacatgaaatttgattatcaataaatttaatactttctctagcattagctgaaattaaaggattgaaaactttctttaaaaaatctaattctcttaatgtatataatggaacataaaatacaatactataaagtttcttattagattcatcattacgttgatttttcaattgattattagttaaatctatccactgtttaattttcccaacacctccataaaccaaagcactcggatcaaggatgtaatgatatacatccatattctccatatccatctctgattatatctctgatatatctgatattcaaagagaaataaaataagtcgtcttggtgatgacatgaattttaatggaaatcgttgaaaatattattccattatagtgagaagtcttgatttgtatatttcattcatttcattcaatacttttatttctataaaactctataatatctatatctacaagatctacaagatctaccagatctatttacataattaatctatagtatcaaagaatgtatcggaagtactaaaagtttctatactagtatcaggtttaaatggccaataataatatacttcagaaagatccacaaattcctgttcagtaatcatactcatctttttatttaatgtttcaattggtattaaatcttttaaataatcttcagctcctggtcctaaaacgtgaagtttatcccttagaatagcaccctggtgcacataataatttatgaattattaaatgtaattcatcatgaaatttaatattaaatttataacaatttgattgtaattcaattaaacaaatttcaccttcaacttcacttgttggtaatttaatataatcatctaattctgcaaataatctttgtgcctttgcatttttcaatttatcactacatgcaattactttaatatctgaatataaatttgccataagtgaattagttcttctatgaattgaacccattggacctaaatattttaaaatttcatttggtgttgtccaagctaaaaatttaattccaccatatgaaaacattgatgttttaacttcattataatatatacaagttcttaaagcagttgaatttgtaactgaaacaaaatctccaataaataataatgaattatttaatggttccctacgttgtaaataatatttagaaatttcttcatttgttggttcaggtaaatattttggttcaattaatttatccttcaatggttgagtaagtaaatttgccttaattgttgttgtaacattatttttcattatatgtacattgattaattcatcatcagtttccataattctatcccaaaatttagttgcacctttaccatcaggataaattaaatgatgttttggttttagtaatttattaagataatatgtcattggtgatactcgtacattataatcaattatatttaattcatttgttgattctccattagattttaaataatttttctttaattcaagtttatcaaatatttgatcataaatctctttactatatcccaatcttaaccctttgatagttttctgcatagatgcatgaactgcatctctgacagtattatgagcagcataaaacttctgcatagtatcctattcttgtcctctataataatattaaaacctatactttcagtgaaaaaataaaataaaataattttccaacatgaaaatttactattagaataaatcaaaccgcggtatctacaccgattaataggttgaactgtctttataagagtagagtagagtaagagtagacgactagaggtacatactacataagaaacatcacaatggctaaaattaaactacgtttgtcgaaaaaggacgatgaaaatccttcaaatgattcaattacaacatcaccttcaacttcaacaacaattaaattaaaacaaccaaagacaagtggtaaaacaactaaaaagactgaatcatcttcatcatcatcatcatcgactggatttttaccaaaaattaaattgaaaacttcatcaccaactataactccatcatctgatgatacatttgctaaaaaatcattgaaaactactaataatataacatcaaattcaataccaactataaaatttaagacattagatcaatcatccaatcaaggaggaaataatgatatagataataataataataataataataataataatgtaaggaaaaataaaaagaaaactccaactattaaagttaaaccagttaaattacctggtaatggatatgattctgaggatcctgataaggaggatgatccattaatcgaggaaggtataataataagatttttacctgatgaaaatttaaatattgttagatcagctgttgaaaattcagagaggggtgataaacataataaagatattgatgatattgatttatcaaatatttcaattgtttggaaggataaaagacgtgcaattgtttatattgaagattcaatgtatgcaggtaaattaattaatttaccaacaatttcagaaattcataaaacaattgataaaaaaaatatttttaaaacaattgatatttcacaaatgttattaattgttaaaaaaatttataatgaaaatgaaatttttaatttaaaaattgataaagaatttggtgaaactttacctgatggtttaacacctccaatggaattttcaaaacaatcatttactaaaaaatatgaaaattcaattattcaaaatgttgaagatgaagttaatagattattaaaacttgatgaagaagctgaaagttcagttttcgaatttattgatacagaggaagaaaaaataataccaatgagtgtaatggaggcaaaggcaaagaataaacgtttaaagaaggagaagaaaagactacgtaaagaaagagaacgtcttcaaatggcaagtaataacaatgatagtataggtataagtattaatacaaatacaaatactaataatgatgatgaaatggatattgatgatcaatttgaagatattgataatgaattagataaattaatggatgaaagtctgaatgatattgatgaagataataataataataataccaaacatgataataataataataataataatcataataatgaagacgacgatgatgactgaagatgacgatgaagatgacgaagaagatgaagaggaggaggaggaagaagaaatagaaataggaaacgatgctggtcaacaaactaataataccacaaaacacagcgaagatgaagaatgacgaatgatgacgatgatgatgatgacgatgatgatgaagatgatgaaaaaagtgaagctgcaagacaatcaattagaaatggtggtgttaatactgatgaaccttcacaacataatgcattaatttatgaggaaatatttgaattagaatcaactatatcacaaaaggagaaagatttaattaaggcaattaatccaattatgaaaaatagaattaatgatgttataagtagattaaaagcaagaattagaaatgaaaaaatcacttattattaatgaagatggagatggtgatcaagctgaaaatgaaaatgaaaatgaaaatgcggatgaggaagaggatgatgaagctaatgaccacaatgatgaagcaaatgaagaagaagaagatgttgaagacgatgaaggagaagatattgaagaagataatattgaagaagaaataataaaatgataaagataaaaataatccatctcaaaacgaagatgaagatgaagacgattatgatgatctattttagatcatttcaaatcctaattaattatacgaataatttttaaaaagctttacatagtgtgtataaatataaaatgtgaatatgtatatgtatattgataaaaacatagaaacatcccctaatgtttcttttcatttttcctaattaaaataattgccgtaatataattttctaaatcaatactttctgaattttcaaaaattttagcaagtaaataatcaggacaattaattttatttgattttaatgctttttgaaattcttcaaaatctaaaacatgatcattacctcttttatcatgataattaaatgaagtataacaacctttaacaaatttacacattttaacaaaacatcttaaatctaattcataatttaatgatgatgatgcaaatgtctttaattattatttctaatgatttaaatgtgaatctagtttgtgatttatatggatcatataatgttgcacctaattgttcaattgaaattaaatcatttgaatttgttaaattttcgaaaaatcttatgaattttttcattatgaacattaatttgatcatcttcaaataaaatcaattgattaattaaattattgtatttaatattattacttaaattcattgattccaaatcatcatttaattcattatctacatcaattattggtattttagcatcaattattccatcattattagagtttttcaatgatcttttagatgatatttcatcactaagaattgatgcagatgaataaatatcagccttttcatgaaatgattcataatgtttcctaggagataatcttttaggtgaatgattttgacttgatttccccacaaatgaatcatattgtaaactatcattatcatcataactataattatccctcctattcattgacaataatgaagagtttgaacttcttgaacttgatctattttgatgttcattattaatagaatttgtcattctattatttgtcatttgtggaggcattgatacatatcgtttttgatgtgaatgtcttgttgaattactcggtatagatgatgaagatgagttatttttagttctcataatattattattataatcataatttctttgatcattatatctatcatttggagatcgtgatacatttggtgaagaaggcatatgttgagacatatttggaggtggtggtggcatatttggcatatttggcatatttggcatatttggtgacattggaggattttgaacataatagtaattattaataatagtaggtttaggtttttcattaataggtacgggtattggtctatttatttgattataagcaaatgctaattgttgtggtgataggctcaccttgataatttcttgattggtgattaacagtttgaggatttgaataatgattgtgtggttcaactaccttttcaggttgttttttagaacctgttgcagcttgtggttgtatagatttgggacttggtgcctaaaatagattttaattattatgttagtaaaactgaatttaagttagttaagattaataaataaataaatataacatactggagcataattactaccgtctaatgacagttctaaaggtttgtttttattcctatgaaacatttgtcactattatgcagtagttgttgatatatgttagtattatgtcaataaaataaacctcatgataaaaataaacatcaccaaaattcatgttaagcgagatggttcgttatatacatagtaaaactactttactttactaaaacaaagtttaatgattatactttaatttatatactataaaagtttaataagaatgaaattaaataaaatttcaacagatttaagctctttctctctttctgtattcatcgttatcatatcttcttcttggagcaccttctcttctttgtggtctttctctttgaggaatcttttgttcaattaaagtagttggaacaacaccttctgggacacctaagaattctcttaagtattcaataccttcatcagttaaggtgtagtagtagtattgccatgagaattgagtcttgacgaaaccttttgaagttaaggattgcattgccttaacaacatataagttcttagtatcaatagtatcgtgttggatttcgaaatctttctttgcaactaaaacaccatctataataatataaagttaaaaatataaggggggagaatattaatgttagtattatgcttctttaagtttatgtcatttgatgaattgttaagagatttagagatgtatgatatattagttatattataatatttccagatttctcatttatatgattaagtgcaccaattgactgaatgtttactttcatattcactatgtttctaatagttgtaatattacttctcaaaaatgtagtatttatccttactttcatagtatcataaaattatcactacataacatatcataacatattatatcaaatctgtcattatatctaacataacatatatcataaatctaaatctactttactctccattaatttaatttgatttattttaattttcatttcatataatttaagtttatcatatgctataatatcttaaaatgtacatacctttgaataagttttcaaaaataactcttctgtcagcctttggaataatcatatttgatggttgatacgggtacttgtcctactgaaacttctaaaaaaatacaattattaaaatattaaatatccaatatttttcccagtaatgaaaactatatcaaaactgaaaaattattgaaaataccctcactacattaattttcattttttttcccactttttcaacttttacttagacaccccagcaccgcaccctgtggcgctttttctttttcgttttctctctttcgcacgcgttttcctcttgcgtcgctttcccttttgggacttttctgcatgttacgcagtcacacaatctacagtgtatatttgcactagcatgaatattgtattgtgtgatagatttgtctattacctaaagcggagttacccgtattaggcaactactttgaactattccataacttattaatctaatcaattattaatccgttatacattatctagcaatctattatatatatatatatatttatcctctatttcatataatccatagacttaacagtctcttgtaaaataaccattctttggtgaacttgttcaatatctttgttaaatttatcttgcttctcatataaagttctcttccaatctttaaacttttgattttgcatttgaacaactcctgtaaatttcttcttaacttgcttctccaattctaaatatgatggatttaattcaactaattccttctcagtatcggtaattgtaattctatttaataaatctaaaatttcaattgaatccttctcttcaattaaatgatctaaacttggatgtgatggactattatcctttgtaacactcttccaactacctctactacttggtacaataacttccttattaaattctttaatacctaatttctcaacttcatcttcattaattgttaaactaattgctttacctaatctatatctcataaaatctttacgataattctcataataactttcagttgatgaaattaaatctcccatataactctcaattaaaaaatctcttaataataaaaaatcacaatgttcaggattctcaacttcacttaaaccccaattatattttctaccacgaacatttttaccttcttcattaacatgatattcaattgaattaattgttgcaaatggcatctcattaattaatgatctaattctactcttttcttcaattaattcacaaattggaatattttcttcctttaatgtatttctaattctttgtttaaatgttgataattcatcacttgtaaaaccatctgctttactaataattggaattaaattaactctacttgataaatttctcattgcatcaatatctaatgctgataatccaattgctgatggtacaataaaataaagacatgcatgaacttcactatgaactaaatttgatctatcaggttgactttcttgataaactaatcttctatattgttcatcaatatatcttgtaattggataccaacaaaatttattatcaatataatcaccaaaacctggtgtatcaattacatttaatctcattctaaaaccatcttcaattaaatccattttatgatgagtaatttttgtagtctttgtaggattttgttcaaaatcttcttgataagtttgtttattttccattaataaagaattaaataatgtattaacaaatgatgatttacctgtacctgattcaccaacacataaaattgtaaaattagaaccttttttataaacttgtaatcttttttgaattgggaaacaaactaatccaatatcatttgaatccatatcatcaattgcagatgcataattataatgatatttttgaaattttaaatcttcagaatgtgcatcatttaaagtttcaacatcaacattattattatcaatatcattattatattgattatgattatgatcattatatttatcaattaaattaccatttttttgatcatcttcattatcgaaatgatttgaattaataagatcttgattatttgatacatgtttgaattcaaattcattatcagtttcagtttcaaaatcaaaattatcactcccccttggaaatgccaatattataattttgctcatccattgatttactaacaacagtatctacattaattttatcttcaccattcattgcactctgaggagtgactacattaattgaatcaacaaccattattcaacagatgtaacttgtcaataagaagtatgttttaaggataaatacttcaaataaaataaagggcaaattcttccaactttaaataaaccccctaaaaaagaagaaatattaaccaattgccctgttttaacattttaaacaccgtattcccctataatcattactctaaactagcctttgcatttctataagaaaggaaacaattccacataactccaatacttgaactaaatggaacttgaaatttctttggcattactgaaaaattaataaattgaactggaaaccaaactgaaaaactaattgctaatgtagttatgtataatttatacattttatccttatattcttctttacttttaccttcaataattatagttgtataagcaaagaaacaagataatgaaattggtgaaaagattaattgatcagttaaatctctctctaaaactgatacaattgctggcatatctgtaaacattgaatttaaaaacatataccaaacaacttgaataaatgccattataaacccccatgtaatgaatccgaaaaaccttctaaaattgaaaaatgttacatgattaaatccattttcaatatcatccagattttcaaaatcaataattacatcattacttccattaaccgtttctccttcatcatcatctccataatctataaagatatttgaattgtcaaatgatgatctactatcattatcagtaaacccattaccacctctcatattaaccttgtgcgatatgattaattctattatttgataatctctgtaatccatttcttctattctcattaaacatcgtaatactctgtgcacatgtatcagatattccatataacacaacattagtgaaaatagttgccaaaatactagatcttgtgtataattgatgatatttgaatgataatttaattaataaataaccaaaaatcgataaaattccatagttaacaattggtatattgaatattctaaatgaatgtgatatttctcccatgaatttggaaaatgatttccatttacgtattaatggattatccataccagtaactgtatgtacagcgtgtattgcttcctcgtatctatcattagcaccaatatcttctccaaattcattgatacgatcaattgtttgagagactagattgtctactccttttagtgtaacaggcataaatgattattaagtttagttacctttaatatgttaataaggtctatatactatagtggctaggctatgaaatattgtaattaagataaaattcaataaatcaacatttttacatgcatgttatcataaaaatttgaaaaaatgcgaaatcacaattatttcctaattaggaaataaaaattaataccactgtgagagcaggcttctttttcgaatttctaagtgttgtaagagttttgtaattctataaaatttataaagatctaaattaattaaaaagactgagctgataccttgtcaacctcaagagtaacattttcagtattttctttatcttcaacaggatcaataatttcttcagctattgataatttctcactttcatttggttgtgtcccaaggaaatttagaaatgcatttgctgacattagtgtatatccttcactaacaagttttctaattgtctcaattgttgctattataataatgattctaccttctcctctattctcctttgattcctgataaattgaagctatatgttttgaagcaacttgaggtgatttagtaatatcttgaagtctttcctgcaacacaggtcgtgatcttagtaatcccatatttattatttggaaagtataggcaagttcatttgattgatcatctaagtctacatagctaattggaatattttcagattctgcattaagtggcaaaaaggtattgatatcattaatcagtctcatatttatctgtttaattagaggatttatatgggagcgaataattggttgattatcaacaaatgaaatatactctcctcttaaatctcttaattgatgaataccatctctagagggttcaataattgttctttgagttaaattaccaacatctactaaagctttacctgttgttacagaaatatttttaattggatcatctaaaataacatttctaatatctctcatccttaaagttttaacaagtggtaaagcttcatctaaattattaagttgattatcaaaataattatcaacataacttgtataaggtcttaaactatttgaataagcaatattcattaaagttggacgtacaattcttggaccaggaatccaatggaagattttaatccatgaatcaacaataggataagttttcaaatgtttataaacatttgtttcagaaggaatagttttatcattattattatttttaagtgtagtgtttgattgtgtttttaattgctcatctaagttctcatccaaatgattattattattattaatatcattatctacattagaaacttcaatatcattattactaacaacattagcagttgaatcaattttagttccagttacagaactttcttctggaacacctgataaaggttctacattagtaaaaatcattggtacagagattgattcaaacattttagaaatggctctaacggaaccagtttgagcaaagtaagacatgtttgtttttttattatatttttttttcaagaaaaggtttacaataaagttgttgttgcctggtaaaagagtagaaggaaggaaagaagaaagaagaaagaagaaagaaagaaagcagataagaagaaatagcaaatagcaaatagcaaataaaaggaaagtagaaaaggggtcttttatacttccaagggcaaatccattttaaatctgctcattcctacttttactggtattatctcctttactactattataatcatgagaaactatattggaaacagggcaactctgtatagtaattgtaatggtaatagtaatattaaaataggtgaagttacgtaatccacaataagtattatcaagattacctaattgggaaaaaggtaaacgccattattttattatctagttttttcactgatttaaatttaaattaaatttattaaattcattacaacattcatttctaaaaggtattaactgtatatcagattcttacatcctttgaagttatctcaggtattttcttctattgtttatattgaaattactttacgactttactttattgactcatcatttaatctaatttaattatattttttcatatctagtataatattaatctgtacaaatctatattgaatttctgaaaaatcaatacttagctaccttttaaaatataaacatagatttatcaattacgaaaataatataaataaaatggatatacctgattttggtgttaaaccattagaaaagactttttcttcaaatatcaatatccctaaactgacgccaccaactagaaagtcaaatacatctccaacaaagagaaataataataataataccacatctttaatatcagattctacgtttagtttgctagatgatttccaaaacggtgataataacgaaaacaatagacttattctctgctccatcattaatgcctccctcttcattgaactcaaatgataatattgatccttctaaactaaaacctcaaaatagggggatttttagttttgaaataggttcatcatcatcatcaaagactaatactccctctgacgctaatacttcaattttttcaatgttaccaactataagctcaaatacatttgattttggatcttatttacgttcagttacttctacatttcaaataaaaccaacaatacctgataatactacatcaattaataaatcattacttgatttctctaatcctgttaaagttgatttacttcgagccgatgatcaaaatttattagatgatttagaacttgattgtgttgtacgtgcaaatcattgggaatcagatgttgaatcagatgatgatttagaacttgatttaagttcagatggtacaaaagatgttggaagtgataataatatgaatatgaatatgaatatgaatatgaataaagtaagatttacacataatcaaaatgaaaatgattatttgaaatattttaatcaagcaaagacgaataataataatatttcctctaatacatctaaagtatcctttaattttgattcaaaacattcttcaaacataccttctcaaataccttatttatgtgatccattaaatagtgcaattaccgctaaatccgatagcaggcatagtagtccaatagcaaatgacaatttaaatattaatactaattcttcaataccattgaaaatatattctgataacattttttctccaagaaataatagtccaacatcatcacaaggatcagataaaacattaaccgaaaattttaattcaataaagggaacaacacaaactataattaaacaagataatagtaaatgtttaccacatcatcatatttttgctgaaaatttaaaatctgcctttaaaccaatacccaaaactttactaaatttaatagttgaatcaagtgatggatcactggaggatgcaactaaatatgcaactgaaattaattcacaaaatagtgaaggtataccgatacctgaaaaaacaacggaattagttaatattccaactgctgctcctgatattaatggtgttaggaaaagtgcaataattagaggtgttagagcaagaaccgatattaagaaaccaaagaataaattaaatataagaaagaacaataatttggaattttcaactaaaataaatcaaacgaatacatttgctaataataataataataataatgatattattgctaatagagaaaagagagttatttttaatacactgggtgaacgtagaagagcacttaacaatgaaagttctaatacacaaaatataagagcaaataatcatattgataccagttttaaaggattttattcactgcaagagaaacaacaattttataaaagaaatattcaaaacaataataatagtaaattatatgaaaaggaaaattattcattcaatgatgatagcaatacattaaataaatctttccctacagcatttaaaagagctagagttaatgaaacttataatactgtttatgatgataatggtaaaaagaaagttaattgggcagataccttagaatggtaagaatattaataatgatattagttttttaggttttttttcttttataatgatttatttaaagctttaaatttttaatatacgaaaggtgtattatataaattaataagtaaacaaccttgaagatttttaaaaaaaacttttaaaaaagtaagtgtttctgtttgttctgcattatgaaataacatttgtaaatacattatgaggtataaaaaaatacaattcattaaaaaaaaggtgaaaagaaacaaagtattgatgatggcaatgatgatgaatgaacttaagtcagacaatcagcggtagtacaattagcagttgcatcaattaaacaatgaatatcatgagaaggttttctatgaatacttgaagttggtaatgattgatcattagtatttgaaatattaaaagttgcactagtacttccattagaattttcatttgaatttgatggtaaattattatttgaatgtgaagaattattgtgttcttgtgataaattttgtgatgaataagtatgaggtaatacacgttgttttgcataaaatgatgaaaattcaggttgaatagttgcactatgaataccataatcatgtaaacataatttaatttcagatgcaacatttaagaaattatcaggtgaacaacttaagtctgcatgtaatgaagcaattaaaacatgttctgttaaattccaaatatggaaatcatgaacatttaaaactgatggaatttctaaaatatctttaacaacatctgaagtttcaattgttgatggtgtaccttgtaataaaattcttgatgaacgtttacataatggtaatgcagatgaaaaaataatacaagttataactaatgaaataaatggatcaaaataatatttccaactataatcagttttccaaatgaaaattgctgtaagcataacaccaatattaccaagtgcatcacctaaaacgtgaaggaaaacaccttgcatattcagagatttttgattagtattatgagaatttttctttctctttttatcagttgaatccagttgatcaacaacatattgtggcataacttgacgtaaatcttcactaccagtcattgtagaatctaataaaggagtattttcttgatcattaagttgagttgcatgttttgaataaattgatttagatctcttttttggaggatgattttcttcatgagattgttcatgagagtgttcatgactatgatcatgactatgatcatgactatgatcattttcaatatcttcattatccaataaattttcttcatcatgagcaccatgagaatgtgaatgaccaccaccaacactaccaccatgagaatggccatgttcatggaaaaggaataaaccaacaatattagaaattaaaccacaagtaccaacaattaaaattaattttggattagtaataactggaggatcaagtaatctttgaactgcttcaatgaaaattgtaaaacataaagcaattaagaaaactgcattaattaaagcacctaaaatttcagctcttaaccaaccataagtatattcaccatcagctgatctagttttagcaacattaacagcccaaaatgcaaccattaaagaaattatatcatttaacatatggaaagaatcagcaattaaggctaacgaattaaccatacaaccaatgataatttccaataaggaaaaacacggtatcaatgactaaaagggccagaattctatattcttttgaagataaggccattgtatttgtatattatctatctatcttttgcaaggggagagggagggggggaataagttcaataagtaattgtctgcttacttaccgtgtctacagcagcaaatatgtgatataactgaaaggaaacaaaagagtggaaataaataataaataccgaccaaataaaaagagaaagaaaaaagttcatcaattacaagaaaatatgccaattcaattcaacaataaaagaaaatacatgaaaaaaatagcatggaacttcaatttctgattacttaatatcgattaagtttccaggttaccagtacagttattaattagaggtcttatttccacttttacttccacctccactttgttttactttcactttcacttggggattccttttcagggtttctgttgctttagattggtgtgtatattctatttatgtgtttatgtctaattgtaatctttaaggaaactgtacatacattccaattgtagattttattatcttgtacactcttattagtttaacactagtattcacactctgcttcacaggtttaaactatgatggctattcttggtcaaagggtgtcataaaaaaaggttgtttttatatgaatcactgtacatgtctttagtttatgatatactgcttctgtctatcttttctaatgggagcagataaataatcgtggttttgttaagattaatggcctactctgtctttctctactctttccaacggtgtttcaacataaatcataaaatatcttagacacagctgtggatttatcactaattacaagagagataaacctagagataaatataacaacgatatatccggtaatgtatcatctactgaaagtataacatcaaatagcaaaaatatactcttattataaagcactttgaaggaaatacatatatcttatacatgtatactgctattaattttgatatatttaaaataaaacaaataaatctgctatgcttagtttgttttagatgtacatacaataatatggatagctattattaacgttcaaaataaactatactatttttttcatttaagaaagtgtcggagttttatcattttgaatagcaactgttacaaagttcaaatcccaaaaacaaataactacctaaagtactcaaggctaatcatccacttactcctttttagtttttagttaaaagtatgatcgagttgaatgcttatgttattgctttggtggctactaatgttccattgtcttttgttgataatgatggaagaaatgaaatgaaaagaagttacataaaattgattttaaagttggaacgactatttgaaattcctgaatataaaccatttttggtaatttttttagtcatcaaatgattcatatatgtttgatatgtggaaatcggttggcttttttagagattgttggtgtttttttactgaaagatgctgctgcacagtcaggaaaaaggttagtcctcataaaaacagtttcaaaatcactcaaaatcaaatggctttcttagcaattgataattgcaaatccatttataaatataagaatgatccaatgagttgttatcagattccaaagtgtaaaaagaatttcaagggatagtgatttggaaatgacaaaaacatacaaatttgatatatgccaaccatctttcataacaaaatagctttaatttctaataaataaccagatctgcactttctgaaagccaattaacaatacattaattttaaaatctaagctcattattacatcaacttttaaacatcaatttacgattacaaaaactattattagaaaattaaagttatcttgattttgctttgtgattacatactacaaaattcattacaaggtattaaaaaggtttaataagtttcaaaaagaatcaaattaataaaataatgtacttcctaatcataaaattggtcttaatgttaaaaactgttatacatttactatattattattataaaggatacataggatagtgaaaatagtacacaatttaagaagtggaggcacggtgtcataatttttcttatcgcatggccatccatttctatcacacgacctttaataatactctacattactaatttttttgcaaatttaatcgatttttttagataatatacatgcatatttaagaaaagaataaaataaaagaaaatatcactaagacgtcaaaatgtaaaattattttagtttataatcaaaaccaagataaaactcaaacaaagaactataattaactaaagaacattaatttggttatttgttttgctctataaactgattgacaatgaccactcttgaatattttttgttggtatcacttttttttttgtttttttgtaatttttgttatagtaaataaaataaaaataattggaaaatcaattatcatttttttcaaaatttaaacttcgaaaacttcaacactaacaccggaattatcagttgcagtaacgacacaccaagcagcaccatcagcatcttgttgttgaccagaattactaactttatttaaaccaatttttttaggattgatttcacaagtagcaccattacatttacttggatcatcacatttaagtctaataccaaaacttggattttcattcttaaaaggacttgaatcttcaaaataaattggattccaaccaattttagcaaatgtactaccattatcatccatattaaaacctgcaacataaggtgcccaattaccataaggattagcagttgaaccccatctacaaccatcttcaacagaaacaccaggagcattaatataaaaatgtgaagcagttttcgcccaataatcagtacctggaacagctaaatcattacttgaaccaccattaacattagttggaattaacattgcttcattacctggtaaaacagtttgacagaatgcaacatctgcacttgcttgattaacagctttggcagtacctttacccttataacaataatcttgatttgaaattggtttatttaaattaccatttgaatcacagaataaaccaccatcttgagaacctggataagaataagttgtaacatcaggattccattgacctgctaaataaccaggttgacaagcatattgacaataagaacctgctttacatggaccatcttgagcccaaccttcagaatttgcaactttagtattaaagacagcaaccataccattatcatttgggaatgaacaagttttaccattatctctcttatgtgcatgatgaacatgttctggagaagcagctggtgcagcagttgaatcgttaattaatgctgataataaaacaacggagatagctttgattgataacattttttttaaaaatttatttgtatttaatttaatttaatttaaaagagtgtgtaaaagttaatttaagatataagatttgtaatttaaaggaatgactaattaaacttttttgaaatgaatgtaagtttaaaatataatttgttttttgattttttttagagtgttttgtcagtcagttgattgataaagaaagaagcaaagtaaaataaaggaaaaaaaaataataaagacataaataatattaagtaatccaatctacaatcataaccttaatcaccaaatatggatggatgatcccagatatttatattaaaactgccctgaaaaagaaacgactccagacacactataaggaagaaatgacacaaaacggcggcagaaaaagtccgttgcccaaaccggaaaaacagcaaaataaataaaaaaataaaaaataaaaaattttccattgtgggaaagtccgaagaaacagatcaaaagggtccagactttcccattttccaatataatttccattttgggtaaattaagtgaatttctcatttctcaaattgatctgtaatactctgtaatacaaatttacaatttttgtagtttctcacactgtgtctggatctgaatttctttttggtggcttagaggatactattagtatttttttattcggatcgccggttgcgtgttacgtaaacagactctgtttcttttctttttgtttgttaatgaatgatttattctttgcattcttccgtaacctagggaatacacgggaatggttgttgaagtgtcatacattaagtatggtaatgaaagtattagacaagtaattaaacgtagtaaaattgataatgtcaattccagtggtaatgttccaaaagttattatacttattcatggtggggcatggcgagatgtaaataatacttgtaatgattatgataaatttgtagagaaatgggataatgatggtcaaaatttacttgtttatagtattgattataaagtttcaagtgaacaaggtggcaaatttcctcaagttgttattgaagtattaaaagctttagaagttattaataatgatattaataataatttaaacattgaaaaggataattacaatgttactcttgttggacattctgttggttgtacattcattacacaaattatggaatatgaaaaattttacacattaaataaactttcaataattgaacatattaacagcttagtattcttagaaggtatttatgatatgaaattattacacgaagaatatccagattatgattttttcgttattgaagaatttgaaaatgttgaaagggcaattaaagaatgtaataatattggaattgatgaaaaagtaattagatatacaacaatggattcaattattattgttcatagtcataatgatgaattattatcattaaaacaaccacaaagaatggttgaatggcttaaaaataaatgtaatgttacaaatgataaattaaatgttcattatggtgattttggactacataatgaagtttatgaaaatatctctgatgtggcgcagctcacgacttcctaaaaaggcaggaggcggtgcgctgcggctaatgcgcgtaaaacttaagggcaagtcgtcaagtcgttgacggttttttgtacatttaattcaaacatttaattgttttaaaatctttttcttaccattttttcccattttcactgattatgtacatatttcattcaacatgtgttgtcagatacgtagtgatattgtacaagaatatcttcttcctattttagggagtgaatttcaaccttttttggccatgcaatactgaaattcaatcgatctgcctatcaaatggtcgttttgaaaggctttacagaataaatcctattagatcataataattactaaatatatcctatattttaagaatactaaaaaaattgtaaaattatgtaatttactcctttaaaattgatctggtcgtatatttgataatattataacttatgtagtggaaaagtataatcagatcatcaataatacgtcaataattagtataaaatataggataataaatacaaaaataacacacatccatacaccttcagtatatagccgacttaagtaatatgaaaccccctctctctctataacttcgctaccctgtgcattatattgaatcaaagttgatctatttctgctttccctcgaacctatttccccttttgccaccttggtaattaagtatattgattatcattcacgatactatttaatatacgtatcttatttacaaagttaattaacaaagataattactgaaatcaaacaagtttctttagaaatttaatctttagaattattatactacttcattttcctgttacctactactaatttatatttgtgaaaaatataaaataaagagaaaatacataatcatcgacaacccgatactctcttttcctcttctcctctctccttttagaaatatatttcattgaacttgttttagtaacttgtttaaataaatactttgtcaattacgtatactctattaaagaagtattttactcattggttagaattgaagaatttcaactgaactaagtcaactcaaatcaaataattgtcaaatcaatccgatccaattcaattcaattcaattcaattcaattcaattcaattcaattcaattttagttcatcaagttttattaaccaaactctgttaataaatcatcgaatcttaatgtatgttactcttttaattcttttttacattcatctctaatttttcagtttactaacaattactctttcaatgaatttcattgaatctctaaattcattcaattatacaatcaccgttaaagaaaaggatttcagattcagaatttccagtacgaccttttccttatcctacatgatttaagatgtttcaaaatacaaaagattactagattccactatcagtttcataaaatttatcaatcagatcaatgatatatcagaaaacacactacaatgaacttttttcaatttcctatttaactttctctttctctttctctttctctttctctttccctttctctttttcatttactatccatcaaatccaaaaataagaagatgtgacctgtcacaaacatcccccaatcataataacaatcaattatagaaagcaagtgtgaaaaccacttatactttattaaagcgattgagaaattttgattcggtgatttttcatttttggatttttttggatttttcaacactcattttaatttttgacattttttcaatctcctgcaaactttccctttgggttttcgagaatgatccatttctcttccttttcaatctttccaatatctctttctcctattctttattggattgatcaaaattattttatcttttatcaaagatctcccatagatctattaattttattaattttgacatttttttcattgtctgttgtgtttttttgacttttatcaaatcttatcacttgttcaagaaatttaaccaagaagaaagtcatcacaagcttctcaaagttctcaatcattagaaataaaatataaacattttaattattcattaaaaaaaaattaaaaaaaaaaagacaggtcaggtcaaattaatttttctgaattcgaaatctattttatttaacggaagttgttaattgcttgaatttcagaactttattttctacagcttgttttcttgtacattaaattattaaaattttatttaagagaaagaaaatcaattactcttttattcaattttattttgttattatagttgttatctgtatcaatagatatattatcatcaagagataaattatttcactaagtttcattttgctatattttacgggcatcgttattttaatttgaatttaccacttgttttctgaaattctcacttaaaaaacagaaaactttcacttgtatcataaatattattaaattattcacattggttagttatagaagaataaataattaacggttcctactcataaaaaaatttgtttttatttcatttaaaaaaaatctaaaaaaatatcaaatcatatatcatctaataaaaaaaatattataatgtccgataatactctttcttcatttgaagaatctgtctctaatgtcaatgttaatgccacaacaactactacccctccaatgggtgagtattctaataaatcaactattaatgatggaattttgtctttaagttcaatgtcaagttcaatcttatccaataaaaatggtttaaattccggaagtaatggaaatatcactgattttgattctttaccgaatgttttaaactctttaagtttgaatgaaccaacatccattttcaatactggtacaattaacccttcaactccaccagctgattggaataataacttaaattataatttgaatacaattaatggtgtaccatctcatcaacatacctcatctaattcatcctcaacaaaggatgatcaaaatgatgttcaacaaaatatatcattctcaaataatattaatgattctgcaaataattcatttatattaccggaaaattcaacaaatttacttcaaaatcatcaaaatcattcttacttatttgatcaatcagttaaaaatactccatcatcttcctatattttatctcctgatagaaatagaaatcaaaccatattcaatacccctattttgaatgaaacttctagaagattggattacaatttaacatctccaaataatatcaatcaattggatgaatcttatattgatcaatctacttcatctgcttctaaagttttagcaaataatttaaataatgaatcattaggtatgggaattcaacctgttatcaacccaaataatgcaaatcaacaaattaattcatctattttcaatggttatataccaaatcaattttcatttttaccgccaatgaatgcggtcaataattcaactactccattaaatggtttatcctctaatttgattaattcaagtccatctacttcaaatatgttacctcatcaattaaatggtttcatgaattcaaatcaaatgatgttaccaaattcctattcctaattacccaactaatttattaaaccaaaattactccttatgataatttcaatggtaatgtaattccagagaatcaaaagcaaaatcaatcaaatcaacttcaagctaatgatcaacgtttcaaatattaatcataatgcaaatcctggttccaattcaaataatcatattaataataataatcaaaaccataatcatcaatcaaacagaaatggaaatggaagccgtaataatttaggtttaaactcaactgcctaatgtgcacagaaagcattcatcaaataacagaagaggtgaagatgcttcaagattcatcaatgcaactttaaatgattttgttaatgaaatttactatttatgcaaagatcaacatggttgtagatttttacaaagacaattagaattacatggtgaaacagcagcaactaaaatcttcaatgaaattcaacttaatgttatagaattaatgattgatccatttggtaattatttaatacaaaaactgttagaaagagttaatgatgaacaaagaactactttagttgaaaatgcatcaaatcaatttgttagaattgctttagatcctcatggtacaagagctttacaaaaattagttgaatatatttcaactgaaactgaatatcaaattatcattgattcattatcttcatatgttgttttattaagtagagatttaaatggtaatcatgttattcaaaaatgtttacaaaaattaccttctaaatattgtaattttatattcactgcagcttgtgagaattgtgttaaaattgcaaaacatagacatggttgttgtgttttacaaagatgttttgatcatggtactcctgctcaatgtgaagatttatctttaaaagttggtgaaaatgcagttgaattaagtattgatccatatggtaattatgttgttcaatatgttttaagtatggaagaaaatagacttagaattaagaatgatcctcaatctgttaataagattcctgatacttctaaatcaatttattttattattaattcattagcatcaaatattacaaaattatcaacacataaatttggttctaatgttattgaaaaatctttacgtataccaacattagcaccaattttaattaaagatttattaaattcaccagagaatttgaaattattattacatgatgcatatggtaattatgttttacaaacttcattagatgttgctgatgattcaagttttaaagaattaagtgagttgttgaaaccttatttaaatgatgttagaaataccccacatggtagaagaattttatcaaagttaattagcagaggtggcaatgcttcaatttataatgtttcaaatatttcttcaattaacaatgaagaaatggaagaacataacaataatatcaatgataatttcaacaacgaaactcaaaatggctattacaatgggtcaaattttaaagatagaacaaattcaaataatcaatttggtaatggtactaataatcgtcgtcacaataacgcatctaattataataattataattcagattataattcaaacaacaattatattaataagaacaaacaaaagttgaattactgagaaaagattaatttatgatttaaaaaaaaatttccatcacttgtcttttatgaaattaacgaaagtaaaaatagagcagtatttcgttaatatgttttttagtctgcacatgtatctttattttattgtttaagtatttccagtctatatatatatatctatacatatttatattatccttaataatttctaattaaataatgaattcgaaaatgaaaaaatccttttactagaggaagatatcagattagtttcctattcgggtaataaataaaaaagttaaaattgtaattttcatgtagttacgtaatgcacttttgactaatttttgactaattttcactaacaaatttgctagcgttttatggttgaaacgttccaaaggttttatggcgtcttttgaaatacgcgttatatgttaaaaattattttattgtgcgcgagaaaaatcttttttaaatcacagaacatagccgttttgagactaagtatgtaaaatttcaaatgcaggttgtatgagaatttaaaatttcttgtttgaaattttgtctattgttagttttgatatcgattacgtaagtattggaatgatttccttactttaaagacgactgaacttttctctactaagagttcctaaataatatcctaaagtaaactaaataaaaataacatataaatggtgtaaaaataaattctttaatctgaatttcttctggaagaaacatgttccacaacatcatctgatttaatttccctataaggaatactttcaacggaatcagaatcaatttcaaaaatatcagcttcaattaatatacctgaatcattaagatgtcttttacctgcaatctttggacaaactttcatatcgtatctttctaaaaaccaaattagaaggaaaactacatgagaaccagcaattaaaccaatattaatcctgtaacctttcttaaaactaggtgcatctttaacatcatattgtaatgggatagaaaatgcattaattccatatgatagtgcctgaatccaactcaaaacaattgctttcttttcaacattatccctacataaagttgcaacccaagtataataaacttgtgcaagacctgataaaaatggatgttctaagaaaaatgcggcaattaacatattatttggtacattccaaataatcaaaacaatacatgaaaaatatgctgttaccataactaaatgcattggaattattttgccataatattgacataacggtgaaatgaaaattgcacatggtataccaacacaatacatataagaatcccatgttgtaacttgttcaacagtatataattctggttttgatttcatataaagttttgcaccattagagtaccaaccaatatgatgtaagacccataatgctgatgcaagataaatttgccaagtagtgacagtctccctaagtgatgcccaagtgaattgttttggaattgcaactttattctccagtcgctttcttgcaaatatcatatcatcttcactgaaaactgtaaaattcttacatgatgatggaatacctgggaacaagaagaaaccataaaggaaaataccaaatgtaataactgcatcaatgataaattgccatctccaaccagctaatcccataacaccgttcaaactttttctagcttgtgattgcaatgcgcctgcgcttgcactaccagcagttgcaaatgcaccatatacaccagctcttttgaataattcctcctcagtgagataacttgataaaataacataagtacaaggaaatgaacatgcttcaaaaacaccaacaaaaaatctaattgcatacatttgtccggcactagtaacatacgcattagccaaagtcatcataccccatgctaattcacaaaataataataaatgtctagagaaatggggtttagtgatcaagagagtgattggaatttgaaataatgcataaccaacggtataacaagtattaaaataattcaattcattaccatgaagatttaaatcagttttcaaaccggaaacataagctgaaccaacattagaattatccaaatactttgtataaaatgatgcacagagaaagaataaaatagttgcatcgaatttcataagaaacttacgttcatatggactataatgtcttggataccaatcaaatgctttaaggaagttatacttatcatattttgaagtcttctttgctcttctatctctatcaactgttggatcattgtattcagttttaaaagatttaggatcatcaattttgaaaaaatgccaaatagtttgtgaaactttactttctttccaactcatgtttgctttggtctggcttcttaactcaaaagaatattttttttgatcagttagatgtctttttatactcattatatcaatgtggttatttaaacaactacggcaataaaatgtggtatccattttatatacatagatcaacgtttacgagccaccactatttttacaaaatcaaatgaaaaattactaatattaatctgcgatgagttaccacccttttttttctatgatcttcaaatgccgccacggtaaggctttttgataagaaaagataaggaagttcaaattagtataccccccattatgagcaacttggcaaactgtggtttaattgagaaaatagatcaatgttaaatattttgttaaattgctaagttaaataaattataaaaaagttaaatagatagattaagggtaatttaagcatcccatttctttaatggtaaacctaaagattctctttgagattttgattccggatcaaaatatggaatttcagctaatgaagtaactctagtaccgtgtcttggacttttaccttcatgatcccaaacatttctatgttgagagattctgttatcccagatagcagatgtaccataacccggtttagtgtttgtccatttaaatctagcttggatatctgcattcttttcataaacatcgaaaagataatttaaaattaaatcactttcaattggagagacaccaagaatacgtttagtcatacctctattaacaaataaaaatttccaaccagttgctggatgagttctaactaatggatgaactctttcaactcttttaggaccacctaatggatcatttctatcaagataagcatgtgcagaaatataaactgctttcttaccatctaaaaatttcttaaattcatcacttaatttatcataggctgcataacctgaggaccaaatagtatcaccaccaacacctggaattgaatctaaatgtaaatgggtgtaaccagctggttgtctttcgtgaactaaatctgtgtgccaaccttggttaccatagcctaaatatctaacactatcccaattggcaaaattagaattactaaagtttaaatctaaacctttttaataacataatcattccaaataacagtttcacctggtaaaccagtaacatggggaacttgaggatggatttcaacattaccataataatgacctaaatctaattgagcttttggagaaagtttttgatctctaaaaaaaactacaacctcttcagcaataagtaatgctaattcatccttttgttgatcacttaaattttccaattgtaaaccaacaatttcagtaccaactttatcagttaaattaatgacttccttagctgcaccaaataaagcttttttttctggatctgcatttgcacctctgtcaacaaatggaacatcataatctctaatagcatgagcttcatcaacaaagattggaattttacttctatcaggaacttcaggataaccttttgataaatcaacaccaccgtcttcaagtctctttctacttgattcaggtaacaatttagtaccttcaagatcagcaccttgaacgatctttatattctcatcccttgttctagtaatatttaactccttatgagctctaactaattgttcaatttgtttgtcaataggtaaatcattgacaatatctaaggactcttttttaacagtttcaactttactcattttcttgttattctttgttagtaaaattatttcactcagaataattagttgaagggattatgctgctgtttttatactaacagtttgattaataatcagtcaaaccaccatggacaaaaatgatcataaaataagaaatatgaaccaaataaagtattctccacagtttgagccaccacagctatctggtgtgaaccaataaatctgtattaataatcaataaatattaatggccttactcaataaagatttagaatctttgtttaacatagtaacaataggggcatctcatcgacattaatctctgttctcctacttctctattcatctttcttggaaataacctctgatctctaaagattttttttgcgcagccgccacaatcagattatcttttttcattatgtgaaaaatacatataccataaaccactataacttaataatatattgatgttttttctatcaaacgcatatgattgtagttcatgtgactgtgaagctattgattattaaaagataaatcaatatatatcaaaacgatcaaatgtaccttttaaaatacatagattttttgtaaacaactgttatttggaacttaagtgtaatatttgaggtaattcaaaaacagttttgattgtatcaacagcttgacttgtaaagtactatgttttgaagaaaaaagtaataacagtttagaaattttaaatttattttgaccaataaaaatgcaaatatttggaaggctccaatttttaatttctactttttaaactatgccaaaggtctatttaaattattacctttagttttaatttgctggttattttattaaagtactaaaatgttaacccaaaaattcaagtcacgtgacgtaaaaagttacacagcactcttacacaagggtacagaaaacaacaatttccgatatagtgtaacggctatcacggtccgctttcaccgggcagacccgggttcgactcccggtatcggaacttctcttttaagcctggctagctcaatcggtagagcgtttgactcttaagtattgatatttaacaaatagcaatcaaaaggctgcgggttcgagccccgcgttgggcttattttttattcaaaaaacttctatgtcctataaccatggaagtaaaaactgttttttttacatgtccagtgatcatatttttttaagtttgaaaggaattcatatagataccaataagtgtaaaagcaattagtgtataaaaactcaaaaagctaaatttatttgatgttataaatataatagtcaactatctcatctaattgattatcaattcttttccaagaagcaattgaattattttctaaatcgatttcaaacattctgattcttctcaaatacccaccatatccaccataaccatccatatccgcatccaccaccttgacatagtgttatatcatctttattaaaacaaaaatcattagcatgatcatggcccacggagattaatttaattccaacatctttcagtacgtcaaacatatgagtattaatatttggtgacatgattgtttctaatcttttaccttgatattgttcaggatccagctgataaatatccctatattcaatcattggtatatggaagaatgccattctaagtgcattaagtgagtttttatgtgatgattctaatgctttaacatagtctttttgactttctttgaaccagtcatatcgaaatgactttgttggtgagtatgaatgggaatccaacatgtagattattaatttctcattattgtcattacctttgaaaagcaatttcataattaccaaaaccatcaacatcttcaggtcctttagaacttaaagaataaggcaaatttgaagagttagttaaatccatcaattctgctctatttaaactaccttcatcatcatgattaccgaaaaccattgcatatggaatttttctttcaattagcggtttgacaactttatacattgacgtctcagaatcaaatgatgcttcaccgaaaatttgatctccggataaaataaccaaatctggtttttccaggtttaacactttgttcacaaaacttagtgtcaattcatcagccaaacatttttttgttgagtaatcttcaggaacaaaatccaaacattcaccaaatccagttgataaatgcaaatcagctaattgaacaattttaagctttttattagcctttaagttgactgagggtaatttagcagtgactctatgcttaacaaatagataaacttcataatcaaactgatgataatcgatttctttaacatcttttataggtctatctgatcctacagataactcatccttcggatttatgctcaatggatatagagagggttgaaaccaaccaggaataggaatatcagcctttggaccaaataaatagttaatatgagaatatgattttttatatttagttgatacatgataccataaaccatagccagcgttgaaataaccaagtttttttaactcagagaatgtcttttcattattagattcaattaaaatattatttggaatctttttgctaacatcattatgactattctcattttctttcttattgaaaacatagaattcatcaactgccggaattgattccttcttaactatatcatatggtaatctaacttcataagcataaatagtactaaaataccttttcttagcatataagttctttttgatataactaatttgggctttctctaaaaattcacgatcattaggaaaaatgtcaaaaatttgattgatattattagtgcatgattttagaaataagaaggaaaagcaagtttcaaacccaactcctactaacacataagaatcttctaattcaccctttgaattttcaagtatggtagctgaatttgaagctggagaattaaaaatagggaatttgcttctagatgatgggaatatgtgtgagattagactgttttcattgaaataagtatcgaaaaatatgaatattgatatgcttataaatatgtaatgaattttccttaaacgttttttgagaatgaccattttgtggtgaatatcgaatattaaaaccttgctttatactagtacagtctttttaattaaacacgactacatataactagtaaatatgaaaaacggatctatatatttactaagtccactataacttaattttcagccactcgtaaaaattttgaattcccagtattttttatggggcacggggggccgttactggggattaaaaatcaccaccggtgactaaaaataaagttacagcttataccttatctgtatacatttgattactctatatatcccactagtcagtctcatttaatcaaaagactgtatatgacctatgataacgctaagacgtctccctagtcttgtacagattaagattttggtgtccaaattaaattaataaaatctatccaagcccccttgccaggccaatgtgtatacgaattttgcgctatcattcataccctaatacccctactaaatttaaaatttgaattttaaggctcagcgatttctgagttgttgtcttataaagaggatggcaaatccacttattcaattattgttttttcttttctgtttttttagttctcttttattttactcccattcatctaacagatgttaacttagttgtaaaacattatggctttgctagttttataatcaaaaacagtgaattcaggtccttgaccttgcaacttttttgtaaaatgggtgtttgaagagagctgtttaaagcatgctcaaccgcatactttgcatttttctacatcttatcataacacttcctttttttaggaggtccaaactgtttccttatgctatttttgcattctacaaaaccatcgttaccaaaacttactctaaatgagtcttccaatgacttgataaatgattcatacttatcatcaaaagcatatcttctcaaaccaacacctgtattaacagcattttgcatttccaccatcttgccactgtactgattgcaatcatacaaatcagataaatatctatccttggcaaacattaacagacattttgcatgttcaggagatttattcataatttcaactctacttttatgataatctccagatttgccagtacttggattgtggtttttatagtggtaacatgttaaatacatagcaatttgtgatttctgagcatctgaattataaaaatcatcatcaacaattggaaaaggaataagcctatgatcaaaaaccatttcatcaccagaaaacaaacatttaaaaacatcttgcaacttcagactatcaaatttgagagaaccataaattggactatcaacaaattcatcacagtattgatcaacataattctcataattggcttccataaactcacaaaatttcttactaattgatacaggtatattattatttaataataattcggttgcatcaatggggtaataaaacggaatttcatcagcaaaactttgtgatctcaattgtgagagttcagcttcattagttgcaagtttgttacatctttgggagtagggactgcattagtaccaacaaaattaaatatggagtggaagttttagcagcataattaccagtgtcagctaatagctgtaaataactcagttattgattaattgttatgtcatatagaaattgaaattaagaaattaaataaaaaaagtaagtagcaaaaaaataaaagagagcctcttgggttatataactaaataaatcattaggaaaagtaatttaatcgtcaagagcaacttcaagaatttgcttaggaatcaatctaggcattttaccatctcgaactttgaagcttggagattgagatgctaagttactgtaaaatgaaaattgtgatttaagtttgccacaaacatcatcaaccacgcaattagcatcttttctcatctcatcaaaataccttctcctagcctcttcaaagtcaccataaatttgagctttgaattgttcccggatacccttcttgccatctacaaaaccatccaagattgagccaaactgtttttcaaaatctttttgcattttcgaaaactttgcctcgtgtcttgacttcagttctgcagcttgatattccatgacatcagcaaaactgctcataaacccctttaaatccatttcccattcttctttcagatccttatataactcctccttgacttcagccttgatttcagatgttaatgcagattttaattctgccttcaactctgatttcaagtcagccatcatttcccttttaatttcttccctcatttctaatttcagctcaccaagtaactcgttcttaaaacactctgtataatcaccgattgtctctaaaacttgttcctttgaatcactaaccatttgaataacactttttctttctctagcaaataatttaacattttcatcattagcctcccgagcaatagtttcaagctcatcaccaagagaagtcttcttttgatctaacattgtcatatgttcagccagaacatcagccgtagcatctcttatattgatttctgcctttgcaatcatatcttcccaaacattgcgttctggtccaccgacaccagaacccaaatgggaatcaacaaccacatcagcatcatcaacaaaacctggaaccacagaaaccacctttgcatctgaggagtgatgggaaacaatcggatggccagttccgaatgcatccccatcacaaccagatacagagttggcgtccttacctccatttgaaacactatttccgttgtttggctcaacatccaacaaatataaaccagaattagactcatcatcagtaataaaacaagattcagcatcggattcagcagcagattcaacatcatcaatttcatcatcattaagttcatcatcattaaattcattatcattatcagcttcattattattaatttcattatcatcattagcaatatccttatctttatcatttccatcattttcattttcattatcaaatacatccataaaacatggaaaagtaacagaaatgtcacttttattggtggataccttggcagagtcttcagacatttttgcactttctgatacagcttcaactcttacagtaataataggtgccacatagtattcattggaaatcttaatttgggatcttttcttcttagcaattctaatcaaatttctgtgtctgattgcaggatcacaaccagcaacatctcctaaataatcaaatgcatcttcaggaatatcttcatcatcttcatcatcttcttcttctttctcgctattgcctgcattggctttagcacgtcttcttttcaacatctccttcaattctctaatagtttcagactttctcttacgtcttctcaatctgtgcccagaaatttcacccttgttttctgtcttaacaagtaatggtaacttcttttcatccttcataccagttaaaagacattctgcatattgggagtagcatgtgtcatcatccatttcatgaagatagaagtcatcagaataaaacacttcacataattcagctctggaggttttgtatgtgaaattttgggattggaaatcacgaatatctgatggttgtaatctgatgattgtatcattatgtttactgaatttgaaaacagaggttgcaatatatgtggcatatggaaccattgcactatcatcttcagcatatgtgagtaatttaccagcatcatgttcagtaatgaaagtcttgttttcaaattgtttcttgaagtgattgtagttgttaatagagaatctgtaaagaaacttaggattgtttaagtacgtttcgatttctgattgggagacagaaaaggataacggggtaatatctgaatagtatttcttagcatgatgttttttgtttggatgttctaagaagtatttggtcatagaccattcaaatactaagtactttgcaacttgaatgatataggttgcagaagcatttaattcattttcagttaattcagcaaagttggaagccttagctttaagaaattcaccggtgctcttaataacagcattaatgtttgcacatctaactatgttagatcttctagtagtgtgaataccaatggaaaagttcattgttttgtatgtgaaatgaacaaaatttcaaagaaaaacaggaaagaacaacatggagataccaggaaaacaaaacaggaaaaggggaatcttctcataaacacatcaacaaatccaacagaaaagagggaaactaccaccaaacaaaccatgcaaacaggtggaaaatagggatcaaatgctatctcggacttcaaagattcccttctccgacccccagatccttcagtgttatcatttcaaaaatttccacaaaaattttcctctcctcgcatttttcgtaacatttgcctgcccgaatttccgaaagggtgtggcaagtaatgaattgatgtaaaagatggtgtgtatattcattgtattcactagcaacggtagcaatgagttgtagttgctcaatcaaaacctaagattttttcttggattgaaaaacccaaatttaacatcaactatgatgacttataagaaaagtcttcagaatgtttaagttattcaaaatctgtctttcaattgagattaattatatcatctttgtatcttgatgattgcgtagtaatttatagcaaagtatatttgatctaagaataagaaccttataaatgactcaaaaaaattgaagttctaaaagcaaattaatgcaacagattctaagaaattatattctcagcacctactaaatctatgaaaaatctcacaatttttaatatgggaggcggcttgacaaaaaataaacggaaaaacttataagatttgaccttgttttagttctacttacaatgaacaatccggtaatgcgtaaatggttatattttatgtatagttataaatctatttatataaaatgaattgcgtttctagaattgtttaatagtacaaacaagttaaataattaatcaactatttgacttgatgattccattccaccacgtccaaggaaattgaacatagctttgaatttatccttacttaaatttaaagatgaatcaaaagattcctgtagcaatttgacttcatttctttgtttcctcaaagcctttaatgcatcatgatcatttgaacagattgggcatttcatatcaccatcttcactattatccaggatattatgagaattgatctctataacacaattttcatgaacatgatgtccacatctgaaaaatatgattggaaaatctagtttattattacagacagaacatttagttgaattaatgatagttggatcattaagcaacccattgatgttttctttaagtttatttttagtattttcatagtctttcatcaatttttcgttattaattattccttgtttttgtttcttaatatttcttagcaaatattccttcaccaagcccaactttacatttgccaaatgacttttattattctcatttgccaatatacagtctaatacttctaatggtgtcattatatctttttgttcaataatttcaagtagttcctttatcctttcatctcctaatttttccatataatagtcattggatgtatacatcgtgagagataatcggaatagttctggttctttctccccataatctttcactatttcaaaagattttatgatatcatcagcaaacatagatgctctaaataaatcaagttcaaatccttccatcaaagaatcggtattctctttcagttctcttataatcatttcaccttcactaaatttataaatgtttgaaatcattaaaattgtcactttatcactctctgtccactcttttctatcctttaacaactttgaagctttctccagccaggtttttctttgactctcatcttggtcagatttgatagaaactgtcaaatacatttcatacaatgtatttaataaatcatttttatcttgaatattaccaccaaacttatcataactttcgatacatgcctctaaaaatataacaaattcataatcgtgattcacaaaacttgaaaaaataattcttggtcttggaggctggtatgttggagcctcctgtggtaaatcaatatttgtttgaatgtcaccactagtcacagaatttgtttcatgatcagctgacttgggattcataaatgacacaaattgttgatatgatgttagcaaagggtaattgtataatttattatcattattattaaccaatgagtccaatacgtctaatgattttttcactgctggcttatattgacctgtaaaaacatcgattaatatttgtgtagtttcgttaggcaaacgattcaataaatcattgatattttcaatcaaaactcctagtagatcattaacatttagagatttaatatactcaaaagcatgaaagtagttcttaatttcgttaagttgaatagatacaattttagacggcaaattgaacttctcagcaattaatagagcggattcgtagttttcattttctttgcacaagtcaatgatcatatttaaatcaaaagatttgtgtttctcagcgtctatgatttcatagtcttcatcaatcataattccttcaataaaagcattaaaatcatccatcatctttaatttagtaaatgaggtgagtaagagatttatatgagaatcatttgttagtttaagctcaaccatactttgaatgtactcaattaaatattggatcttggaactttctttgaactttgatattatttcacttgttttacccaatggaatagattctataaattgtttgatagattcagagtactcagatttgtcatataaatagaaaccatacttttttttcaaattcagtatttcattaacttcaaactcttttggattttcgttaactaatttcaaagctattggaaaaatttcattatttacaagaatttcaacattatcatgcaaagacttctcatgtaaccgaagtaaagacccatcagttaacaatacgtatagatcgttccaaacaggaaaaatatccttaatttcaccagggaatgattgattgaatacaataaagttatttttcaagtccaaaaccattagtttgttgttcgtaaaatcacttgcatatgaaagatctgactcaatatgtgttaagaatagtaaatacctatttttgtaaatgaaaacatttctttttcgtactttcatttgaagggaatgtgttttacctctcatgttataaaattgaaaacaatcttctctagcaaccaataaattagtgcttgttgttcctgatgagatggtaatttgaatatcagtacagtcaacatcagctccatttttatcatcaatcatcttatcaattttcccattgttttgaccaagtgttgataaggtgaaaattttggaaattgttgtaacaaataaggtttgatcatctttgaaatgaattgacgttattggatctttactctcgaatatcagtctttgtctatatcccttatcatgtaaaatatcaccccttactagtatcactgagccattagcaaaaccaaaagacaatattgagtaatcatttgaattagcaaaacatgtcataggataattatttggtccattggatatatcacatttagtatggaaacttgaattgaaatcgaatgccttaaagttaaacttaggatccaaaagctttttcaaatcccataattttaatgatacaggatacccctgcctttctgcaattgttactaaaaatgatgattgttgcctaaggggccttgatttttgtttgtgaggttcaaaaaatgtcattttattgattgtccaaccttcttcgtagcattgaaattctaatcttttattaaattcattgtttataagttttatagtagatttgtatgttgcgattgctataaaatcaccagcatttgagatggctgtgagtgctggatctgaatataatgcatcggcttcagatccatagtatggatctttaatcggagttccttcaaaaaaaggaaattgcctccaagttgaaattgacatacgctagatttgcctttgaaacagttattatactgtcttgaaacgtgttaagtaaggaagtggataaaagttgcaactttcttcccaggtaaattttgataaaattacagagtcaaggattttgatgttaaatactttcagctcgccaaaccttcctttttgggactcttaaaaatatttcaaagggtgccttaacatgaaatcaagatgaaacaccattctaacatcttgatcctgcaatagcttgcgtttattccagctatgtaagagtattattcaagctaatcatcaccccgtaaatgatccttttgtacgttttttactagtaatcctttttaggtactgttgtatacaaaatcataaaatacatatatattaatcaaccacaaaagatagatataagagataagaaaatatacaaaacatgagctttagatatcatgacacttcttcttcagtgtaccccgaagatatatattcagcaaaaaacaatcaaaacagctacaactatctgaaaaaacttagaacacctccaagaaaaactcaagcagatgagacatcattatttgactcaagtgaactccatgacgatgtgtacaaaccttatataacaccaccaactccatttgaaaaatcgactcaagatcattttggatcagataacggtccttctaatccttatgcacaatcattatggtatactttcagaggtaatgatggaaatgaaattgataaatataaaaaattagcaacagaaacacaagagacaaaacctgttctagttgataagaatggtgatagaaaagagttattaccatctttaatgctaaaaacaaaatggctagaaaatgatgagaacaaaatcaaagaaaaagttgatattcaaagaaattcaaataaccagtataatagaattcaaagctcatatgcaattcttgataattccactccaatttctgatttttttcaaagttatgctcaaggctcagacgatgaatacatcgactcagtagatgaaaatatcttaagaccattaaataaccctccaccatatgattttatatcgattgaaacaaatttagtcaagaagctgaaactaatattcgaattatcattgaaatttaaatcatttgttgaagaaaacaagatacttttaaactcaaaagtgacactatacttattcagtaatatcaaaacactcctattaatacattttaatttcctgaatataatattggatataagaaacaacaagtatgatattgaagaaacaatttttgatcatttacaaaggcttcatcatgtgtatccatcatatttagaaagctctaaactaagaaatcgcttcactagactaataattcaaaatcccaaattcaaaacttttgtgataaatcgaaatagtagaatatcagagaaaaatcccaatgaaaagaaaacacttgatattgatgaatattttgtaaatgaattcgaaggagaagaaggtttctataagttgattacctcattatcaaaggacttcagaaagcttttactatatttgaaagattatataggaaaatcaagtcccagaattgatgtattaattgataaactagatgaatatttcgagcaaaatgaagtgacagaacctaataaagcttataattcaaaaaatttggaaaattcctgtaatgataatatcgccatagatgaatcaaatgaaccactatatttggaaattccacagcattggagaacagagcataaactaagttggaaagaaatcagtgggttaaacattgagagacagatggcatattatctcagaagtgaaatgaaaaaggattatgagaattatgctaaagtgagtaaactaatcaaaaatcaaacggatcagatatccagattgtcaatctataacaactatattgccaaaaagtttattcaaattgacacagaacttccaagaggcggtttagttggtaataaatatattgaaaaccttcttgatgtggatgaacaaaataaaaaagtttataaattggttgaatccttggtggagttttccaatgatgtaagtttccaaataactgatgagttgataaaaaaattttgtaaattggctaaaatgatatttactggtacatatctactttcaaacacggctgacttactatttgacattaataagtttcgactcttattcaaagaaagagcattattgttgataataaaatttgagacatttttcaaggaatatattgaaattgttggaccaagtgatggaattgtaaactatgatagtaatgacattgttgcttccttcaaaagaagagtaaatgaaaccacttcagataatgaacactcaatgaaaatcaatgaagaagtgaatagggtttgggcctatgatcgcttagtgaagcgttttttcccacaaaatagacacaatgcgatttgactattgttagtggatggtgggtgttgtacacggtttttagtagaacttttataaattatttaatattatacccaaagtaatctaatactaaataaaagaattgtagatgcttgactcagaaaaggaaaaactggtttcactgcttgaatctgtggaatgccaggagtatatttcattatttgaaaaaaatgatgtcacagttgaactcttcacatcattggataaatactccttgaaagaattgggggttaataaggtaggcgatcgtttaagacttcagatattgatccacgttctgaaattagaaaagatcaaacaacacgttcctaaagatcttttgaataagagtattgatattgctgcaaattcaattacacagttggatcaaaatgtcaaatctcaacgaaattcacaaagtataaaatcttttaatattggcataattatggataatggcgactttaaaaatattagtatcaatggtttattcaataatggtaatgaaatcagacaaaaaatctttttaagtctaggcttggttagtgaaggctggagaatttattatgtagattatgagaaatctaatagtgatcttactctagttgatgatatagttttagtcgactttttcaattcatctcaaataccaaaagaaacaggacgtttcattatttgtcaaaaccataaaagtgtaagcatagaatctatcaacacatcaaataaaattcacagaggaagaaatgagagaaatagtcataacgacaatcttgagcaaaatacatcagagagaaacattcatccatttatgggtggacgtcctccaagtcaattgattagtggtaacttacgtgaatatttcccagatctagataatagagaaattaaggatattaaaagaaaatctttgcttatgtctatgtatagtaataaaatgatgaataagatgaataagggagttgatagtgaaatatttaaaatgaatagagactcattatatagtcgtctaagtcatatctctgttgcttccagtagaatgagtatgataagtgaagccagttatggaattgggaaacctctggccattcataaaccgggggaagttgatgattctgatattagaaataatcaagatgatgaaaagatagaggatgaacaaccttataatgtgattgaattactggatgatgacgatgatgaagaatatgatgaaaataatgaaagtaatgatcaagaaattatgagtataataaatgcagaagttaataatggtccaagtatttggcacaaaggtccaaaaattggtcagggatcttttggtaatgtttatttagggacttaatggtctaacaggagaattgatggctattaaacaagttgatttgccaagtaatgaaacggaaaaatcaaaacgtattatggttaatgcattaaaacaagaaatttccttattgaaggaacttactcatgatcatattgtgagatacttaggatccaatgaagatagttctaatatgtacattttcttagagtatatccctggtggttctgtgagtagtatgcttaaaatgtatggaccatttgaagaggaacttattagaaatttcactaaacaggttttaattggtttaacatatttacatggtaagggaatcatccaccgtgatataaagggtggtaatattttagtcgataataatggtaatgttaaaattggagattttggaatttctaagaagacaacacaagaggaagaagaaaaattaaatgaagaaagtaaaaatagcaacaaaagatcatcattacagggttctgttttctggatggctcccgaagttgttaaacaagtggcatacacctctaaagcagatgtttggtcagttggatgtcttgtcattgaaatgtatacaggaaaacatccatatccaggtttatcaccaatgcaagctcttttccaaatcggaacaggaagagctcaacccgctgtgccggaacgtgcaaacaaggaagacactggatctgaagagttttttgagaaagtatttacaaaagattatacacttagatcatctgctcatcaacttttagaattgaaatttttgaaagtctgatttaattcgatacattgatgaataatttgacaataaagaaagttctaatattatactaaaaatgtcataaaaaagtttctcaacattgggaggcgcagcattttatagcttttcctagtctgttcatacacctttcttttctttgtgtaactataaatataccgtactataccataacatgaataccaatttatcagaacaagacaatgtgcctaaaaaattatgcaatgaagatttggagaaggagttacaaaatgctaagttagtttttgggagacaaacttatcgaccctcatgatagaaggataaggaaaccacattcaagagtagtagggccttttgcaggtaagttcaacaaaaaacacagacaatgctggtggtttgcttaagacaaatgatcatagaccaactacagataaataattgttatgctgtgattattaacatgacatatatacgaaagctcttttgtcaaaaactaagtaatagtaactatttaaaaaaaattgatttacattataagaaatggtcacagaaaaagcagaatcatatatacttaaagatcatatacttaagatcatttagttgtatattgtaaggaaacaatcgtatctttttatagtaataaagaataagatcaattaattataagattgtatgtttttttcaaatatatacgcttaatttataaaaatgagtctctattcatatataccagtattagattagctttttgaatcaacttaactactgttctcataacattgtagctcaatgaaagaagctaattcttccttaaagattcgtgcttgagtactttttaattttcaatttctatcatgccccctcttaaatttttcattgaatttcggtggtacactctctgtagaacagatcttcttagaatctgttgcattgatttgctttcgtcacttcaattttttgagtcattgataaggattcttattcttagatcaaatatactttgctataaatcactacgcaatcatcaagatacaaagatgatataattaatctcaattgaaagacagtatcttgaataacttaaacattctgaagacttttcttataagtcatcatagttgatgttaaatttgtgtttttcaatccaagaaaaaatcttaggttttgactgagcaactacaactcattgctaccgttgctagtgaatacaatgaatatacacaccatcttttacaccaattcatcacttgccacaccctttcggaaatttgggcaggcaaatgtcacgaaaaatgcgaggagaggaaaatttttgtggaaatttttgaaatgataacactgaaggatctgggggtcggagaagggaatctttgaagtccgagatagcatttgatccctattttccacctgtttgcatggtttgtttggtggtggtttccctcttttctgttggatttgttgatgtatttatgagaagattccccttttcctgttttgttttcctggtttctccatgttgttctttcctgtttttctttgaaattttgttcatttcacatacaaaacaatgaacttttccattggtattcacactactagaagatctaacatagttagatgtgcaaacattaatgctgttattaagagcaccggtgaatttcttaaagctaaggcttccaactatgctgaattaactgaaaatgaattaaatgcttctgcaacctatatcattcaagttgcaaagtacttagtatttgaatggtctatgaccaaatacttcttagaacatccaaacaaaaaacatcatgctaagaaatactattcagatattaccccgttatccttttctgttctcccaatcagaaatcgaaacttacttaaacaatcctaagtttctttacagattctctattaacaactacaatcacttcaagaaacaatttgaaaacaagactttcattactgaacatgatgctggtaaattactcacatatgctgaagatgatagtgcaatggttccatatgccacatatattgcaatctctgttttcaaattcagtaaacataatgatacaatcgtcaaattacaaccatcagatattcgtgatttccaatcccaaaatgtcacatacaaaacatccagagctgaattatgtgaagtgttttattctgatgacttttatcttcatgaaatggatgatgacacatgctactcccaatatgcagaatgtcttttaactggtatgaaggatgaaaagaagttaccattacttgttaagacagaaaacaagggtgaaagtttctggtcacagattgagaagacgtaagagaaagtcagaaactattagagaattgaaggagatgttgaaaagaagacgtgctaaagccaatgcaggcaatagcgagaaagaagaagaagaagaagaagaagaagaagatgatgatgatgatattcctgaagatgcatttgattatttaggagatgttgctggttgtgatcctgcaatcagacacagaaatttgattagaattgctaagaagaaaagatcccaaattaagatttccaatgaatactatgtggcacctattattactgtaagagttgaagctgtatcagaaagtgcaaaaatgtctgaagactctgccaaggtatccactaataaaagtgacatttctgttacttttccatgttttatggatgtatttgataatgaaaatgaaaatgatggaaatgataaagataaggatattgctaatgatgataatgaaattaataataatgaagctgataatgataatgaagttaataataatgaagctgataatgataatgaacttaatgatgatgaacttaatgataatgaaattgatgatgttgaatctgctgctgaatctgatgctgaatcttgttttattactgatgatgagtctaattctggtttatatttgttggatgttgagccaaacaacggaaatagtgtttcaaatggaggtaaggacgccaactctgtatctggtggtgatggggatgcacttcggaactggccatccgattgttttccatcactcctcagatgcaaaggtggtttctgtggttccaggttttattgatgatgctgatgtggttgttgattcccatttgggttctggtgtcggtggaccagaacgcaatgtttgggaagatatgattgcaaaggcagaaatcaatataagagatgctacggctgatgttctggctgaacatatgacaatgttagatcaaaagaagacttctcttggtgatgagcttgaaactattgctcgggaggctaatgatgaaaatgttagaatatttgctagagaaagaaaaagtgtcattcaaatggttagtgattcaaaggaacaaattttagaaacaattggtgactacacagcgtgctttagaaatgaattgcttggtgaaatgaagttagagatgaaagatgaaattaaaaaggaaattatggctgacttgaaatcagagttaaaggcagaattaaaatctgcattaacatctgaaattaaggatgagttaaaaaaggagctggaaaatagttgggagttggaattgagggaattcatggctagttttgctgatgttatgcaaggtcaggttgtagaactgaaatccaaatatgattcaaagtttctcagaatgcaacaggcttttgaaaaacaatataattcaatattggatgatgctagaattggtaactttaacatgagggaatactttcaatcagagttaggctatcgactgtgcagatgcaagaagaaagttgtatcatggatatgaagaaagatggtcagtatgtagttgatgatgtttgcaaaaaactttcctcaaggtctgcattttacaataattcaaatttcagattaagagatggtaaaatgcctagatttgttcctaggcagatcattgatgctgtttctgctgttgatattgatgttgatgttaatgctgtttctgttaaaagtgctgattccaatcctaactctgattccgcttgtgctaatgaagttcctatttctgattcaatttccacttctattgatatttccaatactgatgctaataatactactacaactgatttttttaatactaatgttggtaatagggatttaaaaacctggatatcattggaaagatgtaacaaacttgcgactaatgaagctgaactctcacaattgaaattacaaagttttgtagatgaaactccattttattaccccattgatgcaaccgaattgttattaaataatgatatacctgtatcaattagtaagaaattttgtgagtttatggaatccaattatgaaaattatgttgatcgatactgtgatgaatttgttgatagtcctatttatgactctctcaaattcgatagtctgaagttgcaagatgtttttcaatgtttgttttttggtgataaaatggtttttgattataggcttattccttttccaattgttgatgatgacttttataattcagatgctcagaaatctcaaattgcaatgtatttaacatgttaccactacaagaaccacaatccaagtactggcgaaccaggtgattatcataaaagtagagttgaaattatgaataaatctcctgaacatgcaaaatgtctgttaatgtttgccaaggatagatatttatctgatttgtatgattgcaatcagtacagtggcaagatggtggaaatgcaaaatggtgttgatacaggtgtttgatttgagaaggaaatgcttttgatgataaatatgaatcatttatcaagtcattggaagactcatttagagtgagttctggtaacatctcccttgagtttccaattgcaaaaagttgcagaaggtttcattagaatttgttgaatagtattgttagttgtttgttgtttgttatttattattttattttgttaattattaaaaaaaaagaaaaaaaaagaaaaaaaaaagagaattctgattatatgaagaagtatttggaaaatatgtaatatttgaattaaaattattttatgtacttactttttttatgtgatgtttaattctaaagcccttgcttaatttaattaaaaatataatatagaaatcgctatatagttttaacattattaattatacatctaaaattttgataatacacctgggtttgattcaaccacattatttaaacgagccaatatatcctttgttagcaaattattagatttttccttacttttatcatcattctttgtttgatccctttccttatctttacccgtagtttgattaaatccagctaacatataaattttaacaatatcatttggaattatacttaattcttcattcatttctaatcatttcattaataacttcgaattgctaaaaattgattttcaccacttggctgaatttaacattgcagttgttgaattattatcatcaccaagtttaacttgtgcatataaaatatttggtgtaataacagttgctaaattatgagtatccatctttgagccaccagcatcatcatcttcatttgtattagcaaatgttgcaacccatgaaaggaatgcaaataatacttcagttaaatcatgatgacttttaggtaagcattagcataagctaattgtaaaattcttttcttcttagcactatctggattatcaccatcaattttctgtgaaagtaaaaataaatcatataatttaaaagttaacagaggtattggtaaatctcttaagaatttcttaagtaatgcagctaattgaataggagtttctgttgaaaatgttggtactttttcaggatgtttatcaatttcttcaactaaagctttcaatcttctaatattaccatttaatctaaaaaccccttctgcactaacatcttgatttctcataacattaattaattcatcaattcaataatggtatacgaactttagttgagccgatacctaaatcactatcaacaccatacttagtaactaatgtagtaagtgcaacaccaaaaacaccttttcctgtacctgaaatagtagcagagccagatttaaaatcatttgaatgagagttagcattactattactattatgattagagccaaataatttttcccaaaatgataatgatttatgaacatcaatcattgaaatacaatcttcaagtttcattttatctgaaagtaaattatgtaatgcaaatgcagcaatatgacgaatatattcatgagatttattattcaaatctgagtatcttatagtatgattcatttgattatagtttgaaatattccccctcttagtagcattaacatctttttgttttattggagctgtctcatattgtggattaagttgtaattgttgtaatttactttgttcttttaatgaatttttattattactttgaatttccatcatctaattccttatatgaaacagattttggaacaggaagatttgatatctttgatgaataatctctcttttggaaacggaatgcattaggtctatgttcacgagcttgttctgaattaacaattctgggtatatcgtcaagtgttaaagaagctttcatttttcaataatttagatgttaatgtagcattagcagtaccattttcactattcattgattgatttcttgataaattgttaagtttattttcacgttgtgattttttagtacgatcactactattagatatattcctcactttcaatttcattgatcccatagttcccttacgtgaaatttcatgacctctctttggattattaatcttattttgattttcaattatattaggtatcattaacattttctgttcctgcactccaagcagttggtgcttcaataataacatgattttcttatttcatggattagcattactcagttgtctagattcacgcaatgatcttctacgagcaatttctgtaactttattttgataaatatctatatctgagttttcagatcttgatttatcataattaacatcctgtattttattacccttaactgttgatttatctgtaacatcatatgaattcaatgaattgacaatacttgattcacttaattgctttgaatgattctttgcttttcttttatttattactattttagatcgtatcaatgcaatttctaataaataagctaattgcatatacttggaaattaattggaaaccaataagtgcatgaacatcaccggatgcacatgaaggacataatattgaatttgatttaacattatatccagcttctgataaatcacctattggaattcgttgattatttggacatttagaacaattaaagcagtcaatatgccatcttttttccgtggtattattaattttcatttgtatacattcttcttcaatactttttttacaagatgaacagtaatcatcatatttagttggaggtacatttaaagttaaaaattctttagagtaattttcatgtttggatatttcacttaataatatttctgtaggtctcattgagtttgataatttattaaattctaaagcatgcatcaaagaactttttgaaataagcttaataaaatgagcaattgttgaaattaatgatagcagttcttgagaatatttattgtttgacattttttcagagtctgtatctctaaggaaagtaaggtatgacataatttttgaagttaaaaatcttggttctttagttaatttagaatagctatgatattttggagaatcataatcgagtgaataagtgattcgttaaagaataattaaacaatatttccacacttttgaataaacatttgattttaaatataagttttgaagttactagcaaaccttttgatttatcatttatagttgttgaatgtaacatttcagaaattaatgaagcacaagattcttcaaattcagataatgttgaccaaataagtatagttaatttttctaaattcacttcaactttatataatttttcaggatttgaagatatttcctctattgattcaatatttaaacctaatgaatttaccgttacatcaacattccaaaatttatgaaccataaaacattcaggatgccattgttgttgtttaccgcctctataaatttcaacatattgtttaacgattgcacatttacaactttgacaatgatatgcatatagtttagaataatgataatgacaataaattttaccttcattagcataataattatcagattcaaatactttatgacaaatttcacaataaaaatgatctgaatgatatttcctatttaatgcagtaatataagggacctctaattgccttatcacaattataacagattagatcaattcttctaaaataatcatattcacataatggtacatttatagttttagttttattattattattattattattattattatttaaaggatcatttacttcaatatctgcagcaaaaaatttatcagagcatggtttaccacaatcatgacaagtaaaacattcaacatgatatatattatccattgctctaactaatgtaccaattataggttttgaacaacccttacatattttaacttttttaattttatttggtttagtggggcttgaagttattaaatcgtgtgatgtatttattgaaacatttggagcaattttactttctggtgtatttggattactaaaattaaaattattcgatgttggagtgaaaactggatttccttgagatttggatggagatgaatataattgatgataatgatgtttattattatttatttgattattatcattattattcgtacctgacttactaaaattattagttgattgattcaccggtagattatccgactgcatgatatatcaatgggaaaaactcaactgtgtatcttttttattctttatgaactctaaaaatagtttccaaacgatggaaagacactagttccctatttttttctaaattaacagaggatgacagatatctataataccagacgaatgtgtataaatagaatcaatgctagggagaattccaatagcccaagatctatacaaaataccaatgatcaatgatcttaacaagagcaaccccactgaatggcaaactcgtaaaaacgttatttatgaaacactgaaacaaaaacaaagaaaacaaagaaagcaaaacaaaaacgtcataattttgccttccccaaatttccgagggttacgtaagtatttttgaaatttccgaggagcgtgtggatagagttgcctatttgggacatcgacatgaataatagagacccatttattgaattaaaggttccaccaatgtcaattgattgaatcaatcattgtttaaataattacagagtgttgtttgacacttaggtgtttctttaagaaatttatttaaaagaaatttcatatttaacataccttttaagttttttaaaaagttgtcaaagatagatagatcatcatatagtaaatgatatcaaaggatagaccaaaacgtgcatattctcgtaaaggttgtgttcaatgtaagaaaagaaaaggctaaatgtgatgaagggaaaccttcttgtgaaaattgtttagcaaatggtagaacttgtgtttatcaacagctgttgaaatttactgatagacgttcatttacgctaaaaggggcttcacttcaaaatattaattctgaaaaattgaaaaagccaaagaaatcaaaaacggaatctttatcaatttctgatttaaataaactgacgtcaaaggaacaacccatcaatgataatgagaataataataataatgataataataatgaagatgttaacaaacaaattgagaataaacaaaaacctacagattctacagatccatttattagcaatccacctcaaattattcaaaatcctgttaatgtagatataactgcttcacttcataaaattttaaatcttactgatcataataaggctaataatattaatataatggaatctacaaaatcatcagatacacccgataatggtttattagcttcttctagaatagatctagagaactcgctttttgatggtgcatccactttgattaacgatttaaatgagttgatcggatcatttgatgtactagattcaatggattttaaagcacaatctatgggaatgaaaataccagaagatatagcattacgttttgagcagaatacacccagacagaaacaagattttgttcctgaaataacttcaacagaaaaaattaactgacaaactttcaccagcaattaacaatattaatgatgttgtttctactgatttcccaaaattgaactatatggaaaaagatactgatgacaatggcattgatacaccgaatccgatagataatgaaaatgataatgataatgataataacgataatgatgaaaatgattatgacgatgagaacgataatgaaaatgaagaagcggaagaattcacatcaaataaagactatataaaaacgttaactaaatccctagcagattatacatcaacctcaattcctaatattaaatcccctgctgaatctccatttggatttcaaagtaaccataattcaaactataaaacattaaatacaaccaacttaaaggcattcccaccacctacattggaaactttactaccgtttgattatattgaaatgttaaataaaacaagagatgatgaattttttgattctttatcttcatattttaattgggattccaactctttccatattaaatatttgaagatttttgtgacgaatattcatttaaatgtcctcccattctcaacaagttattcagaaaatgcatatactaagatatttttaaaacaagctaaacattctcctcatttattatttgctattcttgcaatagctgcaagattcgaagtataccaaattgaacaacatccaaatattgataattatgaagagaaacttaattatcataaatcttttagatcatattatttatcatcttgtttaaaagcattggagtcagtgttacattctaaagaaaacacaataaataaaattgaatcattattattaacaattcaagttttagcatctgatttttcaggtcataaaggttctcaatggaggactcatttacatggtgctaaagacttacttattaaatattgtcgatatcgtcccttatctctagaacttacaattgtttggatttggttttattcgatggaagttttagctacattaactgctccacatggtggtacaattcatgattttgatgaaatggatgaatttcttccagttttgtgtcctaaaatcccacaatatcttattgattttggtagatcagagaatgttttccaactacagaaaagtattttacttgaacctgggaaattaacttatgcaatctcttatttaggtataagtatagaaggtaaactagataacggagatatttcaaggtttaatatgtatttaggttatgatgaggtaatgattgaagttttgaatgcattggtgtattcaattgagtgtattaaggggaaaaataatattgggaaagttaaggataaaccatattctaatacaactgatctttatgaatcaaaaattctagatagacaaggtaaatcattaaactctgatttcttattatcaatatttgcattgataaaaaaggcaaaaacttttgaatacatgaataattctgctccatatattgtgtcgccaaataacgaattacatccaagtcagatattacaatcagtgatgaatgagaataatacagaacaacctgaagaatcaaagaattttcaaagctttagagaaaatacgtatatctgcatatattcaccctagtcaagattattcccctaatgtaactccatcaccaaattttgaacacttaaacaatttgtcagtttcaccagacgtagtcagcagagtaagttcaattgatagtatagtttcaataattaattccaaaccgtcaaattctaataaatcaacatcaaacttaaatgaagttctctctatttcacctaattactgatattcaagatactgataatgaagatactagtaaatatcttattaataaacatatcgaagaattggcaaataattttgaatatgttaagaataatgtttatttttcatggattgatttatcacagcaattatatgcagatgctgcttttttaagattactaacattacatggaggattatcaacatatggaatgagtattaactcatccctagtacaagatgttgttaatagaatgattatgggattatatggtattgttagatttaaggaacaatttgcagaatcaattgatatagatattgaaaattatgatgtttcagataatgaaatgaaagatttaaataacagatattttagtaagagtttttctgaaatggaagagattaataatgatacattattattaaaatctgttaaagaactatcacaatggccaaattttgaatttgataaatacttacattatcaatttgataatagattagttatgattcaatggccattatatgtttgtgggttatgttgtgtaactcctaaacataaagcctattattgaatgttgttttacaggtttaataggtttaggtgttggtagtggagaattaagtgtcaaaaaattaagaaagatttggacattacaaaaaatgggtaagtttgatcatgaaaagtttaatttatttggacaaggatttgatgatgatgaagaggatgattatgttcccttcatgtaaatagtgtaagtataggtactttcttttttatagagttgattttttcttttaatatacagtaggggggtttttatctgtaataaactaaatatacaattttttgagaaatgaatgaaaatctatccaagtatctatatcaatctaataattcacctcttctactttcatcttttttattaatataataacgttgttcatctttatatttatcaaatttactttcacgtttaagtctatcaagtattttagtttcttcatcagttgttaaattttgtaaatcaggaggtatttcttgcatttgaactgaaggtgcttgatttaaatatcgtaaattttccatcaattgaactcttaaattatctaaatattttttcgtatttttattttcaaatctatcacctaaatttggatgtaatgaataatcaggttcaaaccatgatctaaatggtatatcatcaggtaattttgagcttaattcattattagtcattatactagtttcataacaccataatctactaacatttctaggtgtataaccaccaccaccaagacacatcatgggtataccaaaacttttaacatatttaacacattcaccatgagctttaatatttaaattaaaacaacctaatctatcataacctaaagaatctgcaccacattgttgaataataacagttggtctaattttgtaataacaggttcaataactgatttaaataatttaacatatgaactatcatcaataccatcctgtaatggaacattaagagcaaaatgtttacctttaccaacaccagtttcatcataattaccagtacctgggaagaattctccattatatttatgaaatgaaactgtcataactctatcagtaagataaaaagcttcttgaacaccatcaccatgatgtaaatcaatatcaatatataaaactcttggatgaactcttaataaattaagtattgccataactatatcattaacataacaaaatccacttggttcatattttttagcatgatgtaaaccacctgaccaattaattgcaatatcactcatgcctgaaattaattttcttgaagcatctaatgaagcacctgcataaaattgacaataatcatacataccatcgaaaactggacagtcatcaccaatattaaatttttttaaatcatcagcaaatttagttgaattttgtggtgttatacgttgtaaaaattctatataatcagctgaatggaaattcaataattcctccttacttgctctctcagtttgatataaatccatttgttcatgtaatttatatccactaactaaatgatccgtaagcatcaatctaaaaggtttcattggatgtcgtacaccataatgataagctgcaacatctggattataatgatatgaaacatttggtttatatccaccatcattaaaagtatttattattggttcaaaaaatggagtatgtttagctgttcgaaaatcagttgcaaacgaactgtctggatcagaccatgaattatgtgccatttataagtggttgatggtaactgttcagccagaagtctagagaaagaaaaatgtgaaagtagtaactaattaattctctgaagttcctctatttgagttcgaattcaaaagcgagaggttttacaaatttaaatggatttttgaaattattgcatttttggaattttacggtggcaaaaggtcttttatatctttttcttattattaaaccattgtatactccatagataatcaatagagaatagaaatgtcaggatcagcaggttttgatagacacattacagttttttcaccagagggacgattatatcaagttgaatatgcttttaaggcaattaattcaacaaatcttacaagtctcggtattgtaggtgaagatagtgtttgttttattaatcaaaagaaagttggtgataaattaattgatccttcaagtgtatcatatattttcccaatttctaataatgttggtatgttagcaactggatcaattgcagatgcacgttcgttagcaactagagctagaagtgaaagtgcagaatataaatataaatatggatatgaaatgccagttgatgttttaacaaagagaatggcaaatttatcacaaatatatacacaaagagcatatatgagaccaatgggagttgcattaacatttattagttttgatgaagaatttggtccaagtttattaaagactgatccagctggatattattttagtgcaaaggcgatttctacaggtccaaaacaaagtgaagttgttacaattgttgaaagagattttaagaaagcattaaagaaagattctgaaaataaagtaataattaaaggtgattggaaaaaacttgtagaatatggtattacaacattaagtaatgcattaagtacagattttagaaaaaatgatttagaaattggtatttcaacaaaggaaggttttaaagttttaacacctgatgaaattgatgaaagacttgtctcaattgctgaacaagattagaattgaaattttctaaacaagatattttctataattagtgttataatattataagatcataactaaagtgaattacagtaaactaaaaagtacttattgtatattgtttattgtaaatagaggtaatactacaataaatgtttattctgagtattttacgtcacgtgacaaatactttaattaaaattaataaaaataaactcataggcgtaagaccttctggttgtagagataatatcaagtgaaaaaacaaagtcaaaattgtgattttttgtttacattttgtgcattcaatgtttaccttttcaatagaggttgctttttgtgtttacattagggggctcaagctacgattggatttatctttatgtttgtgtagttcacaaagctatcattgaatagcaatatctaaactattctcttaaaaacggtactaatcatgcatagagattagctttaaggttaaaaataaggaacctaatattcaaaatttaagttaagatgtaaataaaaaagttacaaatttcaaaagtggctcagctttgtttttgaagtgttttattgttgataatcaatagcaatgataagcaaaccttataatttattaaagcttttgtccttagttagtgcttatttcacgcccaggattccattacttagtagatgtttcttttagtgaaagattaaccaaattagtgtgtcaccccgataatggaataggataatgctacagtgcttttcagtttttattgattatgttggattcaaactcattcgtttctggacaatttgactctggaaaatttgaagaaaaataggtatagtcgtcacaccaaagtaaggaactgcagttgtagagtattgtcagcgtatgaaaagtataaatgaggagttggtttcacccttcatatatctttttctcctcttatgatttactcattcctcttctttagatttatttctacatatatatatcgacttacacagttttaatataactccgttaccttaaactagccctacgaccgtattatagttgtgttaagtatacataccaactaaagatgtaattacgtaatctcgatgacttaatgttcatttagcatgaagtggaggcattcatatacagtattggttcactttattataagcctgtattattaggtttggagtgaaaggcacgccataattatagttttaaaacttcaatagataaataaaatgttttctaacattattatagcagtagtagtaataaaaaattgtagtagaattattgaaaaaattatttatttgggaggatcactaaggacgcattccctggaaaggaaataatcagcttgatcaccgcccgacacttgtattatgattataattataataattactagtttccgcgtgacgaaccaaatcgactcttttgttatttcccgtaacagtgaaactgacgcttaaagcattggtattactaaatattttatttttaataataagctaatgctaccatagagctagactctgttgaaagtggacaaaaatggataaaaatggacaaaaactcaaaaaaataaacgtgtctctgaaggacggaggaaagcaccaatgatctattgagcgtgttttaaagactattaaagaaaaagatatgaacgtttaaaaaatcaaaaaaaaacagctttaaagggttataattcgataagtagagctcagataagaataagagctacatctgttagtgcggaaagtcctaaaattgtttttccaggaaataaaaaagtagtaataagtaggattgttaataaataaataaataaataaataaataaataaatgaaaagatattacacaaagtgaaatgtaaaatgtaaacataattgtagtttaatcaataaacataaggaataaataaccaaggacattctttttcatatctaacccaatcttcaccatattttactctacatttttttgaatctctttggcttctatgaattaaaacaataaagtagaaaattgggtaaaaccatgggaaaattgaatcaaaaccacaaattaaactccaagtacatgattgaatccaatctgctgtataatgaatttttcttgcatatttataccaaccatcagttaataaagttgaaccatttttacatttaatatatgaaggatttttcaaaacttgataaggtaaaaatgggaaagtttttctaactgttttatcaccagccataaattttctgaaagaatttttttgaccattagttgtatcaaagaaataatatgaaatgaataataatacataaactaatgcaatataacttgttgaccaattatattcacttggttcatgataatataaataaagtgcactttgagaataactataaggaacacctgaaatagtccaaaaaattaacataaaaccggatttttcatatgccatatcccaagttggtacaatcaattcttcaccctttgaacaagcatttgcataagcataataagcaaaagttaagaagattgattcagctgatacataaccatatttttcatattgtttaagtgaaactgataaacctaataataaaatagtataccaaggtaatctaacttcaaagaacatttttaaatcaattataccaattcttggatttaatggtgcacccataaataaatcataaatatgattacctgtcattctatgataatcttttgaaatcaataatgtataaatgtaaagaccaattgagaatacaaaaccatagaaaattgaacatgacataatttcagggaaatgatccataatataataaagtttaaaaatatttgtaacatgtaaaaataaaactaacgttaaagtagtgtataatgaagcatatgcattacaaaaatatggtaattgtttatcatgtaaatgttttaaaggttgaccctttgtccaaacaccaggtaatgtaacataaaatataccttgtaaaagaatgaatgaagtgaaaattgtaaatgaaaatttagaaggaattgcataatcaatgaaataatctttcatttgaattaagaattccaatattgattgaccttcacttggcaatgcaggtgaaccattataaaacttttgactaatccacatgtaatacattaataatgggaaacctatcatcataccaattgcaccaactggaccaccaaattcatattcagttggtggtacattatcaaccttagtatctgatttctcagtattgaccatcgttactgtaaaaaaagaaatgaaatgaaggtacaattcttcaactttgtgaaccttttaaataaatattgaaacattcccctatatctttaaatgtcaacatcgatgtcgtataagtcgcataagtcgtataactcgtataactcgtataactcgtataaatcgtatatagatcaaataagtcgtataagtcgtataagtcgtataaatcgtatataaatcgtataactcgtataaatcgtataactcatataactcgtattttcaaacgtccatttttatccatttttgtccactttcaacagggtctagctctatggtagcattaacttattattaaaaataaaatatttagtaataccaatgctttaagcgtcagtttcaccgttacgggaaataacaaaagagtcgacttgggtctgtcatgaatgggctcgtggctcatcactattagtgaattacccgcacacattcacacagtggtaataaccttaaggaaagatattatacgagactaaataacatcttcgtggatgagtagactgttggaacttatcatctatgtagcttcttattatataagatcttcaatattcaccctaaacagctgatatataactgttattatattaaagtaagcgtttccctatacgggggaaataatttttcctaagtataatacgtggattacctaatatttgtataattttattacgtaagcgaataatgtataatctattttaatctatttacaacttgtttgagaccatcagtaacactgataaatactaagagattcattccaaagagaaaaatttaaattaaaacttcccggagagggattttttgattttaatctagttactgaataaatgtaaaaagaatttttgcttcccatagtaaatttactaaaaaattgttcaaaaaaacacgaaaaatggccaaaattagtaatgttaataaatgatggtaaacaacacttttaaaacatatcgagtatcttttctatatatagagacttccctctttccagtgatattagttagaagtatccaagtattgtggatctccaacggaaattgattgaaattttgtatggtttaaactttcataactcaatcaattttcaatatttttacaaactaacaacacagacatttgattcagacaattctctatctacttgtctaacgtgagtctatgtggaggtctaacaaataagaaaaaaatttagaaaatcacgtttttgagcgttatcgacgtatttatttaggatacatacactcctagtacctaaattacgtaattcaacccgactggctaacctattccttaccaaatttgtttcaatatttatttgaaaggttcacaaagttgaagaattgtaccttcatttcatctcttttttttacagtaacgatggtcaatactgagaaatcagatactaaggttgattatgtaccaccaactgaatatgaatttggtggtccagttggtgcaattggtatgatgataggtttcccattattaatgtattacatgtggattagtcaaaagttttataatggttcacctgcattgccaagtgaaggtcaatcaatattggaattcttaattcaaatgaaagattatttcattgattatgcaattccttctaaattttcatttacaattttcacttcattcattcttttacaaggtatattttatgttacattacctggtgtttggacaaagggtcaacctttaaaacatttacatgataaacaattaccatatttttgtaatgcatatgcttcattatacactactttaacattagttttatttttacatgttacaaatatttttaaactttattatattatggatcatttccctgaaattatgtcatgttcaattttctatggttttgtattctcaattggtctttacatttatacattattgatttcaaaagattatcatagaatgacaggtaatcatatttatgatttatttatgggtgcaccattaaatccaagaattggtataattgatttaaaaatgttctttgaagttagattaccttggtatactattttattattaggtttatcagtttcacttaaacaatatgaaaaatatggttatgtatcagctgaatcaatcttcttaacttttgcttattatgcttatgcaaatgcttgttcaaagggtgaagaattaattgtaccaacttgggatatggcatatgaaaaattcggttttatgttaattttttggaatatttcaggtgttccatatagttattgtcaaggtgcactttacttatattatcatgaaccaagtgaatataattggtcaacaagttatatttcattagtttatattttattattcatttcatactatttctttgatacaactaatggtcaaaaaaattcttttagaaaatttatggctggtgataaaacagttagaaaaactttcccatttttaccttatcaagttttgaaaaatccttcatatattaaatgtaaaaatggttcaactttattaactgatggttggtataaatatgcaagaaaaattcattataccgcagattggattcaatcatgtacttggggtttaatttgtggttttaattcaattttcccatggtttttcccaattttctattttgttgttttaattcatagaactcaaagagatttaagaaaatgtagagcaaaatatggtgaagattgggttagatatgaaaaagaatgtccttggttatttattccttatgtttattgattaaactacaattatgtctacattttacatttcactttgtgtaatatttatttatttcttaattaactaacaattctatttataaaaaaaaaccttgattgaaaaataatagtacatccgtataaccttaatgtttcatttgagacattgaacatttttcacctgaaaaaagcataaataagtaaattaaaaaaacaattgaaccaattgcagtaaatgaatgaattaatctttgctttttattcattctttgtttcttaacatctttattaaagtatttttcttccttttcattaaagataactttatcttcatttgataaatcataaacttcacctaattcataatcttcactaaaatcataattatctaattgatcaacaattgatttttcatcataatatgcacaatcaaatgaaattttcttttcattatcaaaagtttcctttgattcaggaattatttcattatatgatggtaaaacatcattatcatgagattcattaacaccaactaagtgagcagatttttccattggacttaaataagtatgtgatggtctaatacacatttttttaaaagcaaaaataagttaacagtacctttaacaactactattattgtactttcaactagaacaataaaatataataatcattgacaactaaattaccaactcatccaaaaaattaattacagcgattaaattagttttcttgatgaggtcttttttacaatatcgatagtttgttcaatttttatcatgcaagtaatatattattaaacgatatacatctattatatgatagtataaagaaaatacaattcatataatatctattcagttcattgtattaacaaaaagataatagctttcgatgttaaaagctattttcaattgctaccataataagattgattattaattatctttaaaaaaaatattttcctttttagtcgatgcgaggttcgaactcgcgaccttccccgtgtgaaggggacgtcgtaaccactagaccaaacaactaaaacgtagaaatttgttggccgcacaattcctgtggttagatagtaacataaaacaccgcgaatttcccgcaataaactgcttttcgaaggtttcaatatgtgtattgggaaaagaatactttgtaagtagtgttacaataataaaaattaaataaatataatcagtaaagagtaaaacttacaattttgtaactataaaaatttatcatttagtgtctttcccgtggttatttggaaataaaaattaatgtatggaataaattataggttttttattgtatatttgctttgaaagatactgagggcatgtttagtatgctgttatgtaatagcctaaatgtggggatatagtggtacataactatgcagtttttaagtatgtctagctttttttaaaactaaaaaatttttttattgcagtatatccctatacaaacttaaataatacaatattttaaacaaaaagcaggcatattttggcttacgtaaacaacacaataacatccaagctaacaacatatatttgacagcatgtaagtaatatgaagcttattagtgatataaagtgaatatctatattataatcaatagagacattacaagtggtatagtctgaaggatagactttaataataatgataatcaaagagattaaatgaaataagatttaatgaagaaatatgatgaataatttaataaaccaatgttgacagaaaatcaacggttatgaaaaatgatggggtaggatcattaattaatttattatatacaacttctccactaattgatttagtcacattatattacaactaagaactgaataatagattccccacatggagaatcgggctggcttgtgagataattaattacagttctttaaagtatataaataacatgtataagctctcttgagcgggacatctcaaaataggaaagttggttttagatagaacaagttttggataacttattatctaactttatcttaactaactactcgcataccagttccaccgacagtattcgcatagtaatattaagtacaattagttacagttattattctttattgtattgaaaagattcaacataagtattaattatttgattacgtaatatcatacgtacattataataaacatcctcctaatactttacacagcaagattcgcccgtgtagcgtaatggttaacgcgtttgacttctaatcaaaagattctgggttcgactcccagcatgggtgcaggcgaaatcttcaattatttttttaatttttttaaattcttcaatactataagaaacttacccgctttttctttaagaaaattgaatttcttccatcaacatgaatttcagatttttcaacagttatctgaaatagatttagtctttttttttgaaaggtttagaatagttacaagggccaagatgatgatgaaattcattggtaataagataccattcaatcaattattaatacgtcaatattctaatgaagtttcaaatgttagaaatacatttaaggcaattgattcaagaaagacatttttaatggattcatatacaaaattatggcgtgaaaatgaaattgtcctttttgcacatcataataatttattatcaacagagaatgaaaatttacgtaaatcttttaaaaaagttaatgagaagaatcaagataatttaattgaatttaggaaattaaagggttcaatatttaaatattttttacgtgcaagtgtacataaagatcctgcaagtaaggcagcatttagattaattaaacgtaaaaatattaaacatccattagaaaatttattaaaaggtccaacagctgcaattataattaaaaatttagatcctgcatcagttaaagaagtaagtaaaattttatcaaagcaaaaggaaaaattatttatacttggtggtaaagttggtgatgaatatatgaatattaatgatattgaattatttaagaatttaaaatcattaccagaattaagatcagaattaattggtttattaacaatggcatctggtggtggagttgttagaactttagaaagtgcatcaactgtattatctgcaactcttgaaagtcataagaatgaattagaaaagggtgaagtaaaggaagaagaaaaatagaatagattttgattctaaattgtatagagataactgatcttttataattataaagcctgtaaatattactattattcgagattgaaaaaaaaaaaaaattgaaattttgaaaaaaaaattcataatttttcaaaaacttcctttcatcaaacaatgtcagaatcaacagaatccactatatctaaacgtaaacaatatcgtttagctaaacaagatgagagaaagaaaactgttaaaatagttgaagaaggtaatattgaaaaagcattaccaaagaagagatattatagacaacgtgcacattcaaatccatttagtgatcataaattagaatatcctacaagtccattagaaatggattggagtaaattatatccagattcaagtaaagatgttacaattgcagatattggatgtggatatggaggtttattagtttcacttgcagaggaattcccaaatgaaaaaattttaggtatggaaattagagttcaagttactgaatatgttgaagaaagaattaaagcattacgtgaaaataatggtaataatggtaaatttaataattgtgcagttatacgtggtaattcaatgaaatttttaacaaatttttttaaaagaggtcaattaaataaaatgttcttttgtttccctgatccacattttaaacaacgtaaacataaagctagaattattacaaatactttattaagtgaatatgcttatgtattaaaagaaggtggtataatttatacaattactgatgttttagatttacatgaatggatgaaacaacatttagatgatcatccattatttgaaagattaagtgaaattgaggaatcaaatgataaatgtgttgaaataatgacaaatgcaactgaagaaggtaaaaaagtttcacgtaataatggtagtaaatatattgcttgttatagaagattaccaaattctatctaaaaataataaataataaatataaatgaaaaaagaacttatatatcgatgtataataatattaaaactataactaactagtaaagaaacttttaatacttacagaatcattagttgttttatgtttatgaattgaatgtaatgaaggaatttctacatcaattgattcaacagaattaatcattggagttcttgcattattattaccatcattattattaactaaatcatttgaaaatatttgttcaatttgttcaagtgaaattcctttagtttctgggtatataaaataaacaactaaaattgaaataatacaacttgttgcatgaattaaatataatttccattttaatttttctaataaaattggtgtcatttgaccaacaataaaatttgaaatccaattagttgaagttgcaagtgatgaaccgaaaattctagcattatttggtaaaacttcaggtccaattaaccaaccaattggaccccaagaaaatccaaatgatgcattataaattataattgataaaattaaatttaatgataaattaaattttgaagaaattgaaattgataaaagtgaaattgacattaataaacctcctaatattaataaaggtttcctaccccaataatctgataatttccaaggaattaaagttgataataaataaataattgaattaatacctgttaatttaatacaatcagaacctatccaaccctctttttcaaaaattaaaggtgcataatatgatataacattaataccattaaattgtgcgaaaaattgtgctgaacaagcaataaagattctcagaggatattgttttaataaacttaatggactattattagtattattatttattttagcaagtaaaatactttccttaattgatttaaaatgttgaattgatatatcatcatgaacattaccatttgagaataaatcagcaattacaattaaagcttcttcatcatgatcattttctaataaccaacgaggagattcaatcaatgcaattgtaccaattaataaaataaatccaaataaacattgtgataataaaggaattttaaaagaataatcattttcaataaaattacagaaataacctaaccaaattgaagttgaataacctacaatattaccagtaaattgtatacaacctaataaacctctttgatttgaatgtgaaatttccgaaatataagttggagcagttgaagttaaaataccaatacctaaacctgaaataaatctacctaaacaaattgtgaaaatattaaatgagaaagattgtataaatccaccaaaaatgaaaaataaagccccatattgagttgatttacgtcttgaaatactatgaaataggaaagagaatgataatgaagataataaagcaccaatttcaagtattgaaacaattaaaccaatttggaaattattcggatagtcaaatttctgccgaaaataaggattaataataattgaagagaaatacccttgatcataaccaaataagaaaacacaaattgatatgaatacagatgtgtaaactaataatgatttaccaattagtacagattgaggtatatcctgttgagtaatcattgtttaaccacaaagaaaagaagggatgtgttgataatagataataatctatctatacctttactactcacttatcttaatagtaaatgaaattttatcctctagtgcgtaatcatcccccacttcattattgttattaactgtgacgtcaattatttccactcctagacactgtaatacaccttcaattataccaatatgaaattcaaggaaagtgtttgtatgtggtgatgattcatttattggtattatacctgaataagctaatggattattatcaattataacataagtacctgaatgatttgtacgtaaattatcaatttgcttcccaaataataataaccatactttactacacaagaattttaatacatctaatgaattctgtggtggatatggtaatgattgagtatttgagagtaatatagttgatttataacctacatcaaatccaattttagataatcttgatgagggtttacttgattggatgttatataatgtagattgtgataatagatgatgtaatgctcttgaagatacttgatgattgttcattgtatgtatgtcttatatatactatactctctatactctaaatatacaacttaaagtggcaaaacagtggtaaaaatgggaaattgggtgaaaaatttaatttacagtgagggaatctcataaattataaattattccttacaattcctttgagagcctcctgtgcatctctatttcatcttccatcagattgttaaatacatcaccaatatcttcaattaatgattgtaatctctcagctgattgtacataatgattagaacaaattgtatcaatttctcttaccatatcagaaactgtttcaagactattcctatattgaactaaattacgaattttacccctacgtaattgtgtattaattatttcactttcctttaatgatgaaacagctgatttatattgcaaatcaaatgattttttcaattcttgataatcaatttgatatcctgttttaagattatttaatttatctttaatttcatttcttgttttatctccaatatatcgttgttgaactgcagttaattgttgataacttgctgatggtataatatttggagatggtgatgttttagcaagttcctctaataataatcctaattgtccatgtgcatcggataaattttgtgaatatgtacctatttgtgaacataatgattcaattttatttattgtatttaatgtctgttgttgttgtgttggaccaactattaatgaaggtggaattgatgtcagtgataatgtatcaggtaatattaatggaactctaggtgatgatggtggttgttgatgttgatgttgatgttgatgttgttctagctcactttccaatccctcctcttgttcgttatctttaaattgtttcttcctcaattacctcatcattatcattaccattctgttccatctcactctctccattgacatactgcacaaactctgataaatgaggtggtactactgaactatccattgtcattgccatctctatcaataataaacaatctactgataaagaagagctgctatgaaattaaaaaaaaaggtaaattttatcaaaaattcaatttttcaagcggggcgcggaattatttatttactttattttactatgtgtgtgtggatgcatataattcactgtttctttcattattagagactcctattagactaagtatgaatgataaattacctcttgaactatggaagaaaatatatgattatgtaaatgaagaagaatttcatgatttgaataatcaatatgcaaatttatcatctacggaagttgaaagtatctggaaaaattatatcaagaagcattattttttaactttctatgaccatactactatgcaattcaattgtcaaaaagattataaattatatggtagttcatattatcaattacttttaaaacttcagaaagatgatagttttgttaaagatttaattgatttttactgtatacttattaataatgataataatgcaatgagttcaggtagtcttattgaatcaatgaataatcaattatacaattcatttaattattatttaccgcaattaatgagagaacagagacatgttagatatagtgatcataaagaaattaagggtgaacgttatattacatcaaaaactttttataatatattagatgataggaaatctaatttaaagagaatttatattgcaacaaaattaattgaatcttataatattttccgattatataaagaatttgaaaatttccattgggggtcattaaatgttaataatagaggtgatgataatgaaactttttatcttaaattttcaatgattgatccaatgttttatgatagtttaataacaagacataatgtaattgctaaaactttgaaaaattttaaacctgtcgaagattctaattatacaccacctgcatcaattcaagtatcaaatttaacaaaagttttattaaaagaattgaaaaaacagagaagtttaccacagaaatgatgatgatgatactaaatcagaattaaatttcccatcaccaatatttttatcaagaacttatatgggagaatttgatttaccatttagattgattccattaattgtaaggaaattatgtaaaaatttaggatattataatcgtacaagattagaggaaggatttttaagaattttaaatgaagataataatagtacatatattttaactgtaataggagaagaatttagaagttttggtcatcatgcacttaatcttaaaagctatgttgaatatggaccagatgaatcgacaaatgcaattaatgaacaaggtttagattatgaaaattattttaataatgaaaatattattgctaaacaaggtgatttaccaaatttaattaaaattgaaaagattgaagtgaataatgaagaatttgttattgcaaaatctaaatatggttcacagagtgaattaacaatgattggtaagaaaattccatggaaattgtttaatcaatggaaaaaaatgacaatttataaagttttccaaccacgattgattaatttattcaataaatgtctatacaaggataggtgaatttaatgatgatttaaaggatgattggttttcatataagaatttaatttcaagagaaagaatttgtgaatttaataattcaacagttcatgaatattgctctgaaggcagaagtacgaaagatatggtaaatatgaaattggtgaaattgttaaacttaatacaggtaaatttggtgtaattactaatataattgcaattaatggtacacaaacatctgaatgtattagtacaatatttaattcaaatagatgcagatactgaatatacagttagaggtgattgcatttctgtagagatgatataaagggtgcaattgataacttattaagctttgatatctggggtaaatggtttacaggatttgactggtgaaaagttttataaatgaaatataagtacctatataacactatttatttccaattacgtatcatttccaccacatcatctctccaggggacattctcctgtactttctcttcactatgagctactctgattctattaccaggtattatctcccattcatcaaagttatcaacagctaaaacagctgaacgataatcttcaaatacaacaagcccccgtcgatgggtctgtggcttgttattattagtgtttctatataaatgtacgtctttaactacaccacattgtgagaatagtataagtaaatcgccctctgttacttctaatggtaaattggcaatacttatagtagatgtatgagaatatgagttatgccaagatgcattgattggtgtctttaattgtaattccctctcattgattctactcgtcattgaagtatataagagtagttaataagaaaaaagtgtgaaaaatatttgatttttcaactcgcttattggtatatacacttgaggggaggtctacatgaatctttatatcttctaatctttctttttggacaatgatttctgcagctattagagaacttagattcatcctaccaacaacatcttcacctttaaagaaatttattgttgaagtttatccacaaattaaatcacaaaatcctcatttaaatgttttagttagagaatctcaaggtgttaaaccaacaattgttgctagacttgataaaggtgttgaagttgttaaacatgttgaatggtttctcaaatgctgaattaaaggcattcctttctaatccttaattaatggggagttaatatatttttattatattatattatattatataacgtttatttattctatatacaaacaaaaaaaagattcaaaaagataatcatatcatagtatcataatcatttcttcttttcaataataacacgattacttaaacttttacgtcttgctaattcaacaccttttaatgcttcttcctctctctgtgcacgaattttattattctcttgcatttctttccatgtttgattaaaattatcaaacatacctccattaccattaccaccatttgctaattttgctgcctctaattgttcctttgttggtaatgggaacatacctgtccattttctaaaagcaacattacgtaacaattgagattgaataattgaacaaaatccattaactgaaaaataaatcataacagctgcactcatattccaagtgaaaataattgatgcaaatggtaaaatcatgaaaactttcttcattttacctgaactaaattgggtattacctgtatcaccaccaaatttaaatgcaattgaataaaatgttgcagataataattgtaatccaatataagaatcatggcatacttaaatcttgaaaccatgcaataccaccatctttaaatccatcaattggtaaattactcatttctctaataccaaagaatgcaccaactgaataaaccatttgtgtaacaggtgataaaaacattcttgaatatttaacaccatttttcttatttaaaacacttaattccatttgtttacgttgttgtaaagctctatcaccttttgacattgcagctgtcatttcttttcttaattttttagtttctggcataatatgttgagatcttgccattgtatcactacttttcataaataatgggaataataacattctacatccaacagttgtaactgcaattgttgcccaccatggtaaaccactgaatacatgaacatattctaaaatttgttgaattaaatcacttggccaccatccatcaactaatccaacacttttcaaatatccaatttcattactatttaataatgtattatttaataattctctttgactatctaataattcatcaaatcctaaagaatcttcaattttacgttcctcttcattaataatattttcaatattatgtaaaattgttgatgttgtacttgaacctgaacctgtactatcacttgcaaatctaataccaatttgtgatttaattgtcataccattaaaacccaaagttctggatcttaatggattaactcttattctcatagcaggtcttaatacattcatattgtcccacttaaaaggaagaaataaccactagttgttgtaccataataattatttcgtccatgaaaaatttcattcactgcgctttaacttctttctaatatataaagctctttatatgaacaactacacgatatatgatgataatactgaaggaaaatatagtagtaaagtagttggagagttagttaaccatcctgtattgtttatgaaacatttggattcattaaatgatgtatcgaatacatcaattccatcaaatgagatttccaaatatattaaatcatgtattgatcaaaggaatgatgcaatgttaggtaaattatttgaaaaatatatactctatactggacctgatgaattgaattaagaaacctataattgaattaaataatggacaattattcaatatgattaaatttttcaagttaatgaataatgttaaaatgtattcaaaatgtgttgcatattatacaacacgaatatcaaaggataaaaataaattaatggaaatacatgaaaatagttttagggataagattgatatttatataaataaattaggtccatatgagataattaagaatggaatgtttacaaaatttcaaatttataaacttcaattaaataatgatgatacattaattaatgcattgagtatttatttcaatgagaataagataattctaaatttgaaaatatgtaaagaattatacttaatgatgcatggaatcaatactaaaccatataaggaagaatattccaagacacttaatccagatattcaaatggcaagaatttatagaagtacgataaagaaaacagagatacctgatccactcattatagagaaatacaatgagataataaataattccgactaagaagactcatctacgacagaaacttgatcataatcaacaaaaacattcatcacatgttccatttcactgttatccattcacacttatactgaaactactattagaagttgaatttacaccagaagttccagttaaattattacaatttatagtaatggaatgtggtattaaaccagacaaaccatcacttgtcattaatgggtcaagtactgcgtaagacaggcaatgattccatggccgatatgcttgataacctgtataaagcttagtagataatagatagatagatagacgcgtcatgaatataatataatagagaaaataccactgtttatataagcattttcattttattgtcttgtgatggtgcaaaataccacagcatggaaaggcattatattggttcaactgtagcatagttggaagtgtagtatatccagtaactactagtatgttctttctcttggataatgcgtttgcttgtcattaatcccaactctacacagtctatgactgattcacttgaaagtgaaattaattcattacatttatcatcaaatataactgtagattattatactgcaccgataaatgcacctttatcaattaataatgatattagatgctgaaaattcttcaagtgttgttatggaaaatttaagtgaagattatttaaaagtttatgatggaatcttagttgcttgttatagtgatcatccattaatttataaattaagatcagttacaaatgctaaaatattgggtatttttcaagcttcaataatttatgcattacaggctattgataataaatcagataaagttgcaatattaacatctgttgatgaatgggaacaaatattggataatgcaataattaatttcttaggagtgggaagtttccctaatgatagatttgttcatacattagctgcaaatttaccaattttaaaattacatgaaccagataattacagtattttaatggggaaaattcaaaatcttgttaataaaaatgttaaaattattttacttggttgtgcaggtttatcaacacttgattataaaatgaagaatgatttccccaatattaaattcgttgattctgttaaaattggtataaaacaacttatttcatttattgaaattggtaatgtataaataaaataaagtttatagaaaattataatttcttaattaatctctctaatgcattctttaattcaactttatcactctcttctgcaattattggttcattattataataattcacaagattcttcagtttttcaaaatcattaaataatcctggtataataacattcctttcaaccatcattctctttaaattattaacttcatcagtttccatcttatctgtaagatattcgattaattcaatcagcggttcatctaatattaatcttggttgaattaaataatgtaatttatttgaaatactttcaatccattcatttgtcaaacttttaaaatcagtcaaaataccataaaagactagttaagttcattacctgtcttttcattttcttccttatattcaaatgcatgttctaataaatctgatgatatattttgataaaattctttcattttgttcctattttgataaactaactctttcagaaattcaaatttaaattttgtatctgaaactataagtatattagtctgtcttaaaatttccattatttcatttaactttctagtactggttaagtattgtagatgattccaaatattaacttgatctttcaaacataatttatatccatgtcttatttctaattccttaaaatcaccatattcaataaaatcagggaaaaatccccaaatattatcttcatcatcaatatctgatgataaaagtgctgcaaatactttaccatgatctaaaatctcacgaatttcctgaataagagactttaaatgttttttatcaagtaaattagtaaatttagtaaataaacattgttcagatccatcagttttaaacaaaactgattcatcaatatttttaacccttaatatagaactttcatcttcccagttcaaatttctcaaaaacaactcatcaactcgataatcagcaaagaaataaccaatatgacttaaataatttaataatttaatataaactgattcatttttcacttctttgataaaattaacgagataatctaaagtttccgcatcatggaacgctttagcaggtaatgtaaattctgattcatcaaataaaatattaacaattgattctataggtctcataagttcaatgatctctatagtaataattctcatttgtgtttcgtctcccgctgttatagatggataaactgttttatagaaataaccgaaaagatcaatccaacatacatcattcagcttgggtaatggttgagatatgaacgaaagtttttcgtataattcttcatattcattttcatccggtttaacgttttgaaatctatctattaatgggtaccaaagttttattgattcttcatcttcacgtgctaaaatatcaaaaacacttctaaaaccctggaataatgaccatttctcaaactgattacaattaaatgaaaccaattgaatcaatttactccatattctaccacattccttgtataatctgatatgagctaaatatttgagtgtttcatagactgcttgatatatagtcatatggttaccaccctcctccaatgatgatgatgatgataatgatgtttcaacttcttcagataataaatttcttataagtaatttattcttattgtttgatttaatagattctaataaaattattgccgtatttaatattttattatatcctggtacatcagtgtttattattgaatatagtaaataatttattatttgataactacatttatctaataaatgaggataaagcattgaaaatcttttaattatattaaatttttcacaaattattgaacaacttgggaaaaatttcatttgaattaatgtaattgtaaaatgctcataaagttgacaatatcttagaggagttgttctaattaattgaaatattggagctgttaaagattttgtaatattttcatttttcaaaattctaccacatgtttcataaatatttttcatttcaattatttcagttgttaatggtgataataatgctaaaagttttaatgattgtgatgttgtacgtaatttgaatggatctaaaccattcttcagttcaattacaactgaatctaactcaaatttaacagatttaataatatttcttaaaatgtttggtgtaaatatatttgaatctattgatttcttctttttaatcagttcattaaatgatgcataaacttcaaattttttcttaaaatttttcttaattaatccagtggaacattgctcaataactcttggtatttcaggataatctgctgatattattaatgaaaatcctcttggccaagactcattcttacctaaatctaattttaatatattttcaattgaatatgcatcgatattattcttttcattatatgtacttttcaaaatagatttaacattaacaatatcataattatttggttttataggtgatgataaaatgactgaactttcaatatcacttgaaaatacaacacgttttttcattggtgatgaactgatatcccccttattattttccttaacatcttcctcaatatctttacttgtagtttcattagaatcgggtatttcaatggatatatcatcacttttagatattgaatcaaacatgttgatggatcctgcctttggtttccttattttagtgggtgtatttgatgatggagttgatatagctccagatgatgaattagatgtggttattgtacttgaaattgaagaagctgaatcagttattatttgtgtgtctagtaatggattgacattattattatttgtgctatgatctaaactctccttgagtgctttttttggagaatcggggaataatggagtcagagtattaagtaattgattaatagttactcttttatttgaactactatttcttgatttatttcttggtgatactgatgatgatttcctcaaatcatcacataatttttttcttggagagggagtagtagttttatttctttgtttccttttcaaattagcaacttgttgattcagtttattaacttcatcttctttattaatttcatcttcgttaattaaattaacatgatgagatgaaataggtgatgaatgtcgttttaaaagttgataatatgcgggatctgcatctctagatatttgaccaacactagaatcattcattgacattcaatattgtgatcaaagagcaatatccaggaattaaatagaataaaacaggttatcaaaaaaggtgaaaattcatgtcattaagaaattgaaatggaaattaaaaaatttaacgcgtagcgtgtgtgctctctataaaaataaaaatcaacgtccattttatttattcactgacacttcttttttgatcagttcttatattactgactgactattgccttagacatagattaaacctcatttagcttaaccctactcggaaaccaattagataaatcacataatctatacccgatcaaccacgaagcatcagtttaacgaaaaatcctgtaacctactctaaactaagcaaatataaacccaagtattagaacgaaaaatcatctgagttgattagtagtctaacttggtaagcttaaggtatacgttattctaaatgatgcaaaagattttggttctgatatttttggtaaacgtaatctagtaaaacaaagctatttgagaagttaaaaaaaatctatgaatcaataggaaacagagattttctaaaaaatatttattatctttcaacacaagtttatcattggtattgtttttaaaactacatgccatgttaagttttgtctgagttaatatttatgaaccgttttatacatggtaaaaagaaatcttgaaactaacagtcctaacagtctgcactaaagtccataaaaggtcaaacttaaatgagaaactttaatcttcttaactgatagatcgactctctttttgtatgaatccattaatttaacttttcaaagtgtactgtaaacgtaaataatatttcggattggaccgaactctccaagaagatcaagaagagtatatggatgaaattttacaaaaattgttatttggttctagtgctgagaaaacagtcctagctatagatcttgttttcaaaattgtttgcaaactacttaaaaattaatcagcagaaagatccaaaaggaatattgaaatttatttatcaaattgtttgaaaaaccaaaactgcagagatgcattacaagcaattaatatctaacaaacatttttgcaacaattctccgtgccaatcaattagaaaaagttttttcaaacacggaggtggtctcctctagacgtcatgaggcaagatcaagattaaaattattaaaagatgataaagtaaatatgtgcacaacaattcaaactggactaaaaccaaccagtactgtctctgaactggcagactatggaaacgggcaatttgcaaagaagattatgaaaaaggcaaataacaaacttgattcctctgtagtccaagaagcacttgctgaaattgcagaaaatgtgggtaaattaagtaaggaacaatttcaattattaccatgtatgttgtttcttactgacatgattaaaattgtccccgaagaacaccactctaaattagcaaggcaattagtaccagaacttaacaaatgctctcaagcagcaaaaccagatgttaccacattagctgcgctatttgttgaattagaaaaggaaggtaatttaaccaacccaaataatctggatgaaacgggtttaagattcgataaggattgtaagttcgttacaagaagcaccaaaagtgcaaaacggaaagctaccgatgatggaaatgacgacaaagaaactaaaaagcaagccaataaaatcacaatagcagtagcagcttttcatttcaaacctcgtccgctaaacatggagccacccaaaaatctaattaataaagcagcatggtgtaaaaagtgtggtacagttcaccctccaaataaacatttatgggactctgtcactggaaaacctaacactgcaagtatcaaacgttttgggtataacgcaatgaaattccaaaagaacaatggcaattaacaacacggggtcctatcagaaatttatttaaattttatagttcttagtaatttaataacttcacatgagattgaacatggagacaccaactccaagagaggtgaatcactctctaaactggtagaagagtgcctggtttcaaaaccaaaagaaagaagtgtacgttaaagtggaataattatatggtcactgtgaaaataaattggtcgcacactatctaatattattacgtaaataaatcgatcttacacaagggaaggttatactttagttgtaactaatccgaaatcttgttcgtagttaggaaggattatcacaggtattctaatatagaattcattaacattagatatattctctctagcacggaaaagaattgatccattaccatcaatgaaaatttgatttagatcatatgatgttttcattgctgtattcaattcattatcagtagtattgctatcatcattcttattatttgaatacgtatctgatgtaataaaccttatttgaagataatatttatttgtaaaaaaattagttttaaattgagattctgtttcaattggaattaaaacatcagtatttactgaaaatgtattaaaagtagttaaaactttttcaaataatattgattctaaaatattattatctaatcttgatgatggttcaccatatgtaccttttttcaaatattcatctttataaaatatttgatgttttaatagttgaatttcaatacctgttgtttcatatctatcattttcaagatttaaatttatattaatataatcacctaatttgaaaactgcctttttcaataaaattgttgcaattgcatcattattttgtttaatgatatattttgtttgttgttcccttggtaataaatgatcatattcaaatgtatcactcaagttttcaactaaatctttttgtctttgtgcatatttataatctgataaaatttccattaagttttctctaaggttaaatttataagattttttattaatcatacttttatcaaattgttcctgtatttgaataatgctatttacatctgatttatccaatgaatctaaaattttaaggaaatcttgaatatcttcatcttccagtactgatggttgtgataaacttaaattactcatattcaatttactcttatatgttgaattaattgttgaatggaaacttgaacttgaacttaatctacgtgattcaatcctcttttttaaattccaaaagctaattcttctaactgagtttctgtttccattctttaacgtggatgatagttgatgatttgatatatcttcaattactaaatcttcagaaaacatatttaaatttgatttttgtaaatgatatattggttgtctaccataattatcaatgaatggttgaatcttaaatggaacaaaaattgttttactaattatatttttaccttctgtttcttgataacctaatataaaattataactaatgttgactgcctctgttgaataagttggtggaagaaatttaggtaatttacaattgatatagaatgacttttcattaagactttcattattatttggatcaaattccagttcactaaatataatgttttgatttgaactatagaatgggataaatttcatatgattttcagttgctgtatttatattcggggaactcatttctgtattatacaatgtattcaaaccagataaaaaattagaaccatcatcatcattatcaatatttgaattcagtccatgtatacctgcaaatttcccctctattattgtacttttctgtaattctttaaataatgaataatctattatagtatcattaattgtataatgacctaatatttgtccataaccaagaataagagatgttacctttgtttcctctacttcatctaattttgtctcatcattagtatctttattaaaactatctaaaaataatgatcttgttgcattagataattgagtggacaatcgactaccaaaccaaccaccagttgatttatcctctgatgatttatcctcaactttctcaactgatttttcaacaggttgttttggatctatattattactactattttcatcttcattctcttcgtctatatttacttctgtatttgaatttgagaaaggatcttgaaatgatgttttgaaaggtcatatctgaaatattattaacatattggaatttcactaataatgagaattcatcagttcctgcgaacactggattgttttcataaataaatgatactttaacattatcattgatttgtctcacgtaagttctgtgagtgtccattgattgtctcaatgacatagatgtcaatgacagtgtttaatcaatccagtattgattcgaattcaaattcatgaaaacaatagagaaagttcgcgccttgaaaaacaaaagcggtgattatgtaatatggttgaaatttagaattgggagccaaattgtattgtatagttttaatagtagtaactagagtagatgttatatatagtctctacataatgtttaaggagtttcacatagtatattaaaatgaaggataattggcttatactatatctgtaaaaataattgtaagtttatgaattatttgaaaaatttagtatttaagaaataatttttctctattaatcactatttcatcactcaactcccacatgacatcagtaaggacttcaatacatcaaaaaaacaatcttagatgcacaaatacttactgaaaagaaccaataaccacaaaaccagacaaatacatgaaaaaaatgagtataaaaaaagcgttgatgaaaagggaaatttctagtttcccctttttgctctcatcaaatgttgaatacattactctcttttctacacccaacaaagctaactttgcttattataagaaaaactagtggtcagatccagccaagtaataacagaagtaaatttttattcaactattataaaaaaaaatcccccacaatagatgagtctttatgataatgttgtaagttatagagcaccatctcaaatatggtgtatccttttattaataactttctcatattattgttatagaaatatatatttacaatcagagattggttttaaattaccacctgttaatttaatttctgcattgaatagttttggcatatttgcagatttaccatcaaatgaaaggtttgacctttacgtaaatttagctaaaactttcgatgcctataaagatgattatatgaatcattatgaagattatttacttctgattaatagttatttaatattagatgaatcacaaattgcattgaaatattatgcttataaattttatattaatgaagaatatgaattaaatgataattttgttttaggatctccgattgttgaattcaatttgaattttgattcggaaaataataataaagatagagatttgaattttattaacaaacattatcaactttttggggttaaaaataataaagaaagttgtgaattattttttaataattatatctatccattgttcaagtcacaaagtaattggaaagaagttgaaattgcaaaatcaatgtctcaagttttgaatcattggactttggttaaaagattacaaattacttgttttgctttgtcattatcttttattcttttttcaattatcactttcctcatagcaaaatgtaaaccagaaagtttatataagacatttttgggttatactattatgttcttatattcattggcctatatcactacggtaatattagctttcatttgtgtctcaattacaattgttacttataatatcaatttaaattttgaagggttacataatacaagttttaatgttttacaaattggttggttattatttattggttatatttcggtattatgggtatctaactttatcagttgtaataatccattgaataaattaaataatgatgatgagaatgataatttaagaagtcatattaatgcattgatgaatttatctgttaattcaagtgaaaaattatcacaacctgaaattacagagtctatgaatgaaaaaggaacaacaaaagtaacagaaaacattgttgaaaatggacaagcaaatgatgctgataatgaagctaatgatgaatttgaaactgaaaagaattataagattcctattttaaaaagtgcttcaattgcattgaactccagtattaaacctttagttacatcattgaaaagattggttacaccaaagccagccggtactgcaattgattttgaaaaaattgatgaagaatttattaactatgccaatcttgatacatcatttgaaccatttaatgaagaaaaaacagtatctgatgttgtttattatttaccatctggaaatacaactaataaaagtccaacaacagaaattgataagattttcactaaagatgcatttgaaaactttaaagctttaaatttagtttcatccttatcacttaatcatcctgatgtctcaccatgtgatgatggtttaataagttataactcttcttcaaattctcctcaaagtaaggttaatgttagtggtataaaaaatagttcagaacaaaattcaattatgcaagatttaaatagcaaaagagcaggattttatcaacatgcgggattatctgttaataataatagctccaatagtgagaaagttggtagtaatagtaataatagttcatattcaagtaaaccaagtgcaactgattctggatataaattttattatggatcaaatactaaagaaattgtgcccaaatcatttaatcatgttggattattaaaatatccaattgaaaaattaacaccaatgagtggtaaagattcaagtattgaatgggaaaagaagtttggactttcaagtgcaatatcggaagcagaaacaattcaacttgattcagttaatcaaatagactcgggtacaagttcaagtttgaaatcaagttataaaagtaagttaaacacaccaaatacaaaagaaaaagaaagagagacggaaacttccagaaactcaagaaatcataataataataataataataagagtagtcatagtaataataatagtccaaaaaacactaatattaacaatgcttcacctgagaagaagccaaaggtcaagaaaccaaaggaaagaaagaaaagtaattttgagtatttcttaccaagtactatgcaatctgaattcacacaatcatcagcagaaattaccacatcagataaagagcaagatgttgaaagtggacaattagagacacaatcaattcctgaacaacagactggtagcatgttttctattgaaagagttgtaaatgaacatcgtagaagtatgtaaatataaatttgtaaaatatatactgtataaatattattattattagattcttttcaaagtagttttaaagttaaagttatgaaagatgtttctatttaggagctaaaattggatgattcttaagtgattcaagataaggagcaattttgttgtacttgtcataggagagtccaaaaatcgagaattgatggaagatcttgtaagcaacaatatcagcaactaaaatttcatcactgattaaatactttgtctttttttctttcaattcattattgaaatattcagtgtaattatagattttttccataccactactcttatcattatcagtagtaccaaaaaatgcttgaataaaagcaaatataaagtcactattgaaaaaagaaagccatttcatattagttgctttctcctttagatttttacctaaaaattcaggtttggaagatgaattaataatgtaaacataaataacaacagcttcagtcaatttaaaaccatcagatgtaataagtgcaggagttttacctaattgaaaaagttctttgtaattatcaacagttttaacatcaacactttcaatatctaatccaacgtatttacctaaatctgaaatccaattagatcttccagaatttggttccatgtataaagtagcccaggtcatttctttgtgattttttttgtggttgttacatctctaagtctatattgttcatatttagatacttttctgttggttttatacttacctcttgtccatgaagatacatgctgaatattatggagtagccaaattaactccgtgtgatgtttaattcctttacttaactccgtgttttaataaattttagctgggctttaccctatatatatgttacctccattcaggtcttatttgctatctacgaatgtatcatttctggttgcaaaagtgttatgtctcatcagtctgttttgactgttaagtattcactatataggtatccaataacacaatcttatacaatgcgtttgatgattctgaaccatcggaatttgacggaatccggaaatgaatttttttttacttgatgataattttttctaataatataggtttggtgatgatgttgatgttaatgatgatggtgatcaattgataaggaccatatactagatcattgaacccatattatatataccccctataagatatgaaattccctcaaaatatagagtttgatgataaattatgtcgacttcaaataaacaatctacgtaaaactaggcccatggtacaaagtgaatgtaaatttcatattggacatatttatagagagattaaatatcaatttgatcaaattaattttaaactaaaaccttctaatgcaattagtgatattcaattggattctgatttagaaaaatttatgaatgatttgttcttagagacaaatattataatgaatacaccaggtttaattaatactttaatgcatgaatgtattaaacataattgttcagctcaattcttacgtgatgttattgatcaatatgatagtaatggtgaagtatcaggtatgagattattagtttcaatgaatagattaagaagaggtatttgggaatataatatacttgaaagagttgaatgtattgaagaaaattatttacattggtcatttcgtaaatgtgttttcgaaatggaggcaattcatgaagttaaacctgcattatttaatagaactacattggttactaaattattatataaggctaatcatcatcaaaaattagatgaatttgcttcaaattcaatgctcatatttgatatgttacatgatgatttcttagaatctactgaacctaatgatgtattaggattttcatttgaattggttcactcttcaactttattagattgtatcaaaagtttgggaattgatatagattcagaaaatattaactataatgatgcaaagagaagaaaaattcaataatttgatattttagagaatataatattatgtttatttatttctgtttactaatgtttgtttactttatttatttatttatttatttatttatttatttatttttatgttgtacaaataatttacaaaaggttatgcttatatatttttagtttcagttctatttaattgtttatttctgctgcggttgcttcttcattaccttcattactttcatcaatttcgttaacttcactctcaacttgatcagacgcttccttaataacatactcattcacatcttcgtcccattcaacaattggatcagcaattttatcaccattaggtttcaataatccaaatttaacatcaaattcattataatcaagtttctttttcatataacctaaatacattttataagcttcaccttcaagaaccattgaatcagaatataaaacagatgtatctaaattgtaaagtcttgcatttttgaaaattaaatgaacatcaaacataaattcatctaatgaattataagtccaattattcattcttctcttaactgtatcaaatgcaattggatttttaataataacataataatcagggtataatcttttctgtggttttgcattgaaaattttacataatttcctacctgttggattaacaaaattttgaacgtgattaagaatttcaaccatttgagtttgtaatgtaacacgatcttcaccaaatggttcctctgatggataaatttctcttgataatggtgttgtaccaaaattctttcttctacgaactggtggtccactaaaagtattttctgcagtttcagatactggtgttgcacctttagatggtttctttgatttctttaaactagtctttggacgttttaaagctctattttcttcatctaaatcatcatccaaatcttcattagtttcttctaatccatcaacaccttcttcatcattatcatcaactttcttattactacttcccttcttacggcctctctttttaggctttttattctcatcttcatctaattcattatcttctgcatcactaactaaaccatcaatttgtctcaaccattgttcttcagttagattttcatcatattgagtaattttacgttctctagtaccacgtccatacgcatctaaatcttcaactttctcttcctcaggttgaatttcttgattataaacctcgggtaattcctcttctgaatataatcttggtaaattagagttccaattcttcattctttcttcatcaatctgtctgaaaatttcaatttcttcttcagttctagctaaaatttcattcaaatcatcatcatttaaatcatcatcattatcatttgattgttcctcggtttcaatcaattttcttaataatgcttcttgttcttcagcagtagatttttgatcaaatttaccagcttgaataactttaccatcaatatctaatttttgatgtgccttctctaaaatatattcttcaattgaatcacttgtaatcaatcttaaaattctaacttcattcttttgaccaatacgatgtgcacgatcttgtgcttgtaaatcttgatgaggattccaatcagtatcaaaaataataacagtatctgcagtttgtaaatttaaacctaaaccaccagctcttgtagataataagaaaattgaataaggagaattttctgcattaaaatcatgtaataaatcttgtctatcatctgccttagtatcaccatccaatctcatatatttaacatcacgaaatcttaaaaaatcttccataatatccataatttgagtcatttgaaagaacattaaaactctatgaccagttttagcaaattttggtaaaattctatccaatagttcaaatttaccacaaactctccagattaaatcgttattttgatgtgatggattaatcatatcttcaatatcttggaaaacaaatggatgattacaaatttttcttaattgcattaatttattattcatacctttaataccaactgcattattatctttatcgccaatatataatttattatatttaagcatttggtgatacatttttgcttgtaaacctgactttttacatttgataactttttcaattttatttggtaatgatttttcaacatctttcttcaatctacgtaaaaggaaaggtcttaaaactttatgtaatcttctaataaccaataatgtttcttcttctgataattcaattttatcttgaccaccagtattagcaaaaggtgtattaaaccattcatcaaaggatttaacagaattaaaaattttaggtaagacaaaatttaataatgcccataattcaggtaaattattttgtaatggagtaccagttaaaattaatctataatcagtatgataaaattcatttaatgtataagataatttagattttgcatttttcattctatgaccttcatcaataatcatatgaacccatttaattttagataataaatatttatctttaataatatattcataagttgttaataaaacattaaaatctcttgccttaacacgttgggctaattctttacgatatgctggattacctttataactaattttcttcaaacttggagcccatttgtcaaattcattattccaatttgataaaacactaagtggcacaataactaaaaatggaccaggtaattttttaacttctgtaatataagttaataatgaaattgtttgaatagttttacctaaacccatttcatcggctagaataccattaagatgattattatataatgaaaccatccattctaaaccacgaatttgatattcctttaatgtaccaccaactaaaattgaaggttgttgagtaactttttccttaattttatgtgcaacatgataataatctgaattttgctttttctcaaattctgtttcattaccatcatcatttgcaatttcatcatcattgtcctcagtttcatctgtatgaccaactttaaccattttttcatgggtttctctttgttgatctttaacagcagctgttaaactacttaagaaagaattggtttgattaagaagatgagtaattctagtatccttagtttgatctaataatttaacataagcttcctcatcatttgcctttaaagcttgtaatctttgttttgcatttttctcaattctacgttgttcttccttttctgcttgttgatgataaaataataaatttttagctaatctttgatattttgattttttctccaataagattttcatatgatcactggaagctgttaataaattagcttgtctttcaataacttgatgaattttcttttctgattctattttcttctgttcatcatataatgcagtaactaatgatgcatcattcataccaattattcttgcctttgcggagaaattgggtaaatgattaattaataacatatcttgatgatgaacacatgatagaatatatcctcttaaagctttttgtaaaggtaataatttaaaggcttcaaaatcgattttaaatgattcatcgattttggctaatttttctaaattatcgagctcatattgaattaataaattttcatgtaatgattttaactcaactgcagttttaacatctaatggatttggataaattgaaggtgtgaaaatcttagattttggtaaatttaaaaattcatataaaatattactctttaattgaggaatgacaaaagtatcaacaatagcatttggatcttgagtattttcccttttaacattattatattttggatcaaatttatcagccaaaattggaggatggggaggtaatgtacgtggaggttgaattttgttatctattggaatatcgacaggggtttcaagttcagattgtttcttagatttctttggttttctaggtttcttcttatcctgtgctagatttttagattgttcatctggaactggaataccacctggacctttagccatcgcttgttgttgtgcttgttgttgtaaaagtctaagctggtattctttttccttttgttgttcttgtttctgtatttgagcttgcttataaagattttgaacttccatatctgcagaattatcaatacttggatgttgaagatttccttgtgttctatcgttattcaattgaggaatcgatgatcttgattggttatttaattccattaacttagccttttgttcaggaaattgattataacttgcggttattatatttactaaatcaggagttattggttgactttgaataaattttttaaaagttgcaatctgaaatttcaaaacatgtgcttgaactggatggaagatagaagatggttggtttggagtttgagcagatggtgagttcatttgtactggttgttcattttgtctagcaaattgtttagcttgttgttgttgttgattctgaggttgagcttgttgttgagtttgttgatgttgaacttgaggttgtggttgtggttgtggttgtggttgagatatctgttgttgttgctgttgatacagattttgatgttgattattttgagaattttgtaactttgcttgcagttgttgttgtaataaaatattcttttgctgaggtgttaactcagatttcatcatttgaggtgtttgattagatccattatttgggctattaaagttcataaactgttgatttgagtcaattggattagaaaaagagccattttgttgggactgttgttgttgttgaggtagtccttgttgctgaagatctttattatttgatttacttttttgttgtaaatgagattgaattttttggaaatttggatcatttgataataaagtgaataatttaatatattggggcattctattagcatttgcaccatgttgaaatcttagttgttgtaaacgtttataaatttcttgaatttgagagactgataatccttgttgagtaaattgttgttgaatattattaaaatttggattatttgtcgtgtttggggtattgttattgtttatatcttgaccagaaggggtattcgcttgagaagatccattaggtgaaccattctgtgattgatgttgttgctgtagcagttgttgttgttgctggtcggggatattgaattgctgagcattaaaattcatgatttagaaaaatgtgtatgagcaatataattataattcaaaatataatatattaatacaaaaaatatgaataaatggataaacacggaacagtaatgaaatcaattgacggaaagataaaagtatataataataataatgggataattactatcacttgacactgtacagtatattacctatcaatctctggaattacctaaataaaacaataataataaataataataaaagagttttacataattataatcgatgtggcgatgtttatccaaagtgtcattttttccattttttaatggacagcggggtttttcttatttaaatattatactcgcaattttcactgcttttgctcggaattttagtttagttattaatacacatctacaagagtggaactgatgcaccatctcctctaggatcactaccaccggcatagactaaatgatcatcgcctcgttgtgactctaatctaatgatttgtcctctacccatcatttgcctgtctttacccttcataactttaactttatgacctaatttttctaatttcttaacaacttcatcatcaataccttcttcaattccaacaagtgtaaaatcattagatactggtccatctgatccattacctttatcagtatgttcatattctggatgtccagataggcaaattctaggtgaatctaatgcttgttgtggattcatgccaaaataaatcatattaagataaacttgtacatgtgcctgtggttgattatatcctcccataataccatatgatgcatataaatgttcctcattatttctttcaccctctgttcctgtggtaatcatacctggaataattgtatgatatgaacgtttacctccttcaagacaattcttacttgttggatttaaactaaaattaccacctctattttgtaaaacaaatccacgttttggtacaataataccactaccaaacccttcatataaagaattaataaatgagcatgcattaccttcactatcagctactgtaaaatagacagtatcagatttaaacattggattcggaattactaatttattattttcaatcactttatcattttgaaattctttacttcttaatgaaagatattcatcacttaaaactttagaaattaaattatgttgatcaataccggttttctccttatgatgatcataatcattaacatattcctcagattccttaaatgaaatttttaaacattcaattaataaatgtaaatattcagctgaattatgatttagttgactcaattgaattgtcttatcattttctaattgtttaattaatcctaatgtcattaatgcaataatacctgatccatttggtggaatttcccataatttatgatttaaaaattcataactaattggttcaacaaatgtagttttatgatttgataaatcatctaaagttaaaacatgacctctctttttcatttcttctacaattgaattagcaacttcacccttataaaagccatccttacctaataatgcaatggttttcaatgtatttgcaaaatcaatatttttcataaattgtccctctcttggagctttagaattattatcatttggtaaaaaattcttaatatcatcactatcattatcattctcctttaataatttactttcagaattctcccataaatgtgcactaataccagaaacgacataaccattctcacataaatcaatagcaggttgtaaaatttctgcaaatgaaacattaccacttccccatttttcaacagaatcataccaacctgcaattgcaccaggtacattaactttaaaaactgaatctttcttgaatctgaaattaggtaaaatatgatcaggatgattttcctttaaatattcaatattcaaattcttagctgaacgacctgtaccattcataccataaactttcttatctgattttttataaaataatgcaaaacagtccccaccaattccagttgatgcaggttctaaaactgttaaacatgcagaaattgcaactgatgcatcaacactattaccacctttctctaaaattttaatacctgcagcatttgctaatggttgagttgatgaaaccatccccttagttgagtaaactgttgatcttcttgaattgtatggaagatccattgtggttgtctagagagtttggtataaagtagtgtattgtatataattttcaaagatcaattatcaaagatccacagtttctgtgtgctttgttcaatctgaaaaagcttatcgtatcggtcttcggtatttttttcccgataatgcgaagtggatattttttttttcctatttgggacttccgtagatacttactttatattattggactgttaatttgacattgtaatttctcttgttattgatgtgtgtctaagttctttaataagaattaaaaattataatttgcaaatttttcactttattatggtaaaaaaaatattttaaaaaacatgagatttacctcagaaattgagcaaaaaatcaaacgtcttcttttagcaaaataactatttcatcaaaaagctacacaaaaataacataccaaggtatgaaagttcaaacttctaggcctctcaaagatgtaaaaattaacaaaaacaagcccaaaggtcacgtgaacttactatgtggaatttattctacaaagagtaattgtacaggaagcataagtggccgagcggtctaaggcgacagactcaagttctgttactggtaacagtgcgcaggttcgaaccctgccttatgcatttcctaacttttgcgggcttagctcagtgggagagcgccagactgaagatctggaggccatgtgttcgatccacatagctcgcaaggaaatttatttttttgtgtcttttggtttgttatatttgtacaaatagatacatttttttaatcttgattataatgattttgaaagaattatttagtaaattattagtatagcttttatacagaaagagttatatattataatatgtttttatttattattgtattgtattttatatattattagtaaacgagagtagagtagtactgattaatgtttatagtaaatttaaatcttctaatctttgacaatgaggtaactccattgattcagcctttttaatagtttcccaatcattaaataatataccttttgcaccatcaattaaatcttttttataattcatttctcgtttacaaccaaattgtaattgttcaatatatttattttcaacatatttatctaaacctgataattcagattcagaatcttttcgtccattgaaaatcatttaaagtattttcatcaatataataaggtatattatattttggtgttaaacgttcaatttcatatttatcaaattttgtatattgataaacaggtggtttaccatgaaattgttttgaatttgatctaaaattataagaatctgatccacctgataagaaattcataaacattgaaaaaaatataattaataatggtataaattgaattaatgttgctaaccattttggaccttcctgttgttgttgttgttgattttgtccattacgtctatttgtacgatgttgttgatttgcacgtcttcttgcattcataccaggatttgtaaagaaaaatccattatcacccataccattcataccattaccaccaaattggaaactaaatccattattaccacctgcacccatattaaataacatattaaataaatcatcattaaatccaccacccatgccagcaccttgtgggaaaccttgaaaaccttgaaaaccttgagggaaaccttgaaatcctgaacctgcagcaaaaccatttccaccaccactacgtgaatcaggatctgaacctgtcatatcatacattttacgttttgaatcatcacctaaaatttcaaatgcttttgcaataactttaaatgcttctgatgcttttggatgtttattcttatcaggatgtaatttaattgccagtttcctataagatttcttaatttctacatcatttgcagatttatcaacttttagtacacgataataatctgtatgtttaattgaaagtatttcttccactatttgcttttgctctggtgtataatctgtcattcccgatgctctctaataatatatgataatgataatgataatgaaaagattataatattaataattatgtacaatgatatgagataatatagaataagaaacactaataataattggtaattgaaaagtaataactatatatcttacttgcttatcagaatataatataaaatcacctatataatcagttattcagaataccaacggttgtccaacagaaattttgcaggtggcaaactgagaatttaactgaaatttgaaattttggtatgtgtggccttttctttgtgtgcttacgtaacttttagaatactttactttactttactttacttacttataatgttatatagttataaactactattagataaactatttatcatcatcaagaagccagagggccatctctttcttttcattatccttactcttcttatcattctttatttcatcaactttaccctccataacaacttgttgaacatgttccttttgctttgcacgatctctcattctttcctcaattgtatcacgaaccaataatctataaactgtaacttgtctctgttgacctaatctatgtgctctatccattgcttgtgaatcaatagttggattccaatcagaatcatagaaaataactgtatctgctgctgttaaattaatacctaaaccaccagctctagttgaaagaaggaaaataaataattctggattactttgccaatcattaactaaatctcttctatcacttaatcttgatgatccatctaatctaatatatttatattgtctatatgttaaatattcttccattaaatccatcattctagtcatttggaaataaattaaacatttatgatcccccttctttaaatcaactaacatttgatcaagtttctttaattttgcactttcaagaacaaatctttccattgatggtaatctaattgtacctccattcatataattagattcctcctctgggtacatctctgcctttggccaatctttaatagatacgtctttctcaattaattcagcttgtgtatctaaattcaatggtaataatgcttgtcttatcttttcattgaaaaaatatatcctttttagtgttttcaaaattacttttagaacaaactatttcaattggtggtgctgatgcattgataaaatatccaggtctaaaacttctcatatacatttcctttaatgaatcatctttaacattcaataaagaatctggaattaaatctgttttgatatctgataatattaatgaattctttttatccttattataaatttctttgaaaattcttaaatcttcattatttttagaatttaaatatgatctattatcaattgcattattaattaaactattagcaactatcttttcaatctcatttggtgtttcattaataaattttaaaatgtttaattcactatctttatcattgtgataattattaacatcatagatattaaacattttcttaattaatctttccttatctgttaaattattactatcaagtgatgttaataataaatcattaacaatagttcttggtaaattataacttattaaatttttggtattataatttaattctaagttagttttcattgacttccctaattaaactttcagtaactgggtaattactgaatgaaaatgcagattttgtatcagctctctcaaataaatcaggatgattacaaacttttctaaattgcataacaacattcattaatgattcaacttcttcattattaccaatcctcttattattttcaattaaatcaacaacattaatttgtgatcttaacatacgatataatttcttttgtctattagttaaatcacaataaacatcaatttcaatcttttcacctaattcactttgaacattctttttaattctacgtaacatgaaaaggtttcaaaattgcatgtaaacgacgtaattgttcctcatttaatttagaattagattgtgcatgtgcttcaatatctttagagaaccattcactaaattcatcatgtgaatcaaataatgatggcataataaaatgtaataatgcccataattcttgcatattattttgaattggtgtacctgttaataataatctattacgacattgtaaatttaataaagatttccatctagttgattgtgatgatttgattgcttgtgcttcatctaaaatcatatattgccatttcattttttgaaaatattgtgcatctgcaacaactaattgatatgatgtaacaacaacatgaaatggtgaatttctattataaataatattctttctatcccaaaatttacgtaaaactttacgatctttagatgtaccccaatatggtaaaacattaaaatctggaacgaatttagtaatttcttgttgccaattatgtaatgttgatgatggtgtaacaactaagaatggaccccaaatatcatgagtctctgccagatatgctaaaactgaaatactttgaactgttttacccaaacccatttcatctgctaaaataccattaataccttgttcatataagttggctaaccaatttaaacctttacgttgatattcctttaatgtacaattaagtaatttaggttgatcaactaataaatcacctgccattgttggattttggaaattcatttcaccttcattatcttcatcatcagcatcttcattattactagctctttgaactccatcattaaattgttgtgctttatttttagcttctaaaagagcagtttgtgcatttgctgctgctcttttatgtaatgcatcatcatcttcatcatcaaaatctaaattattgaaatctttggttgctaaacttaaatcaacatcttcttcattatgagctttaccattactattatttgaagcaatacttttatcacccatatcaccttcaaattcacttgttttaatttttctaccaatgaagtgtgaatataattcagtttgattaattaagaaatttaattttcttgattgtctctttgcttctctctcctcttcttccttctttgctctttgcaaagcttcctgttctgcctttaatcttaagtttctttcctccttttcattctttttccagaaacttaacatttctctcatacatcttcttgccttagcatattgatccttttgagctttacttgtctttgattgccattttcttgattctcttgcagctaattgagcaattttctttgaattgatacttttagcttgtgcagtttgttgaaataatctgtatgcctttggattatcctttcttgataaatctttccaaattgataaatatgtgttctcatattgtctctcaattgatttaatttcctttactgagaatctaagttgagcttcttttgcttgatccttcaatgtctctgcatcttcctctttaataatctcactagtatcattactaccactagcaccatttttaggagttggctttctacgttttttctttggtacagtttcatcactcatttcaattgcagcttcaattatttcatcttcctcttcatcttcttcatctaataatttcgataattgcgattcaatttccttttcaccaagcatttcatcatcacgtctaacaggttttcttcttctcttaccaggaacaaaacttgtagaatctatcggttttttatcagatttatcattttcgtcactcttattattaccatttttatttttatttttaggttttggacctggcttacccgatcttggaccaggtttgaatccaggttttggaccaggtttctttcttggaggttttacaggtgttgtagttgaagaattagttgatgatgattgaggtttgagttttaatgtaatggtagttggagtagatgatttatttgcagattcattgaaaagtacatttttcattggatcaatatcatcaactcttaaattatcaatataaggatttaaatcatttgttaatgaagtttttgaatttggatgatttttagaattaagtaaatgttctctctcagtttgagcatcaacaaggaaattaatgacatctgattttaaatgatttaataatggttcttcatcatttaaaattttatgtcttttaaaaatttgttcatgaattgttggatttgaagctaatgaattctttaaattttccattaatgattgttctaaataaatcccattagttgtagctaaactctgtaattgatcattatacattttgagaccatttataccattatttgcagcattatccaatgtaattacagtatttaatttttgtttaaacacgttaagtaattcatctgatgatgcaagttgaaatgaactaccatcagttattccaacttcaccatcactaccattctcttcctttgtcatatccaatggagtggttgcttgtgaaacagtgagaatgaacgaataaagacttcttcagcggatggcaatattaattaattaaatgcacacacaacacactgcaagttatgtttcgtcgagtatgttcaaaacttacctaattaattacaattaattacttaattacttaacgttattctgttactacactcttctctttataccacgcagtgatgtcccagagtaatgacaatatagccaatgcagtggctttcttgaaagatccatctgttaaggatactcccatctcaaagaagatacaattcttagagagtaaaggtatgtcagatattgaaattgaaactgccctaaatcaagttaataataataataataataatagtgttgtacaaccaacagttccagctattccacaaatggcaccaccaattccatattattccaatggtatgccacctccaccacctcctccaaggggattagattggaaagattatgttattatgtgtacaactactgccggtgttgtatatggagcttatcaagttgtttcaagatatgtaattccaaaattaattccaccatcacagagtaaattagatgaagataaggaagcaatggagagagaatttcaaagagttgaaaatatattggaaaaattagagactgatcaaactgaatttattaaaagacaagatgaaaagagtaaattaattgatgatgcattaattgaagttgatgcaattgttaaggcaactaatgagaaaaatctacgtaatgaagagacattaaaatatcttaaattggaaattgaaagtattaaaacttcattattaaagagtttagaatcacaaaaatcaacaatttcaactgaattacaggaacttgaaaagaaaactgatagtattaaggaaactataaagcagttagaaattaatggtaatggtaaacctgctagcaaatccaattcaattacaccatcttcaactccacctccaaatttattaacaaataatagatcaacatctaatactaccgttccaacagtttcaacatattctaatcttaaaattccagatccatcatcaattccatctgctaaaagtattttaaatacggttgaagatactgattcaaactcaaatactcctgaaccagtttcatacccattatctactaatgctaatattccagcttggcaattagcttcatcacagaaaagcaatacatcaattcctgcatggcaagttgcatcagagaataaataggtaattaattaattaattaaatagcttttctttatataaatttataacgtttttatatactttttatataattattgaaaataatgaaacaggttttcatttttagtttaaaatcaaaagagaaaatacatttgtctattattaaaatgaagagaaaataagtggtatcttgaaatatgaaagaaaaaattagatgtctaagaaagaagcagttaaaagtgtgaattgtgtctaatactatacatcaaaatgaatgattgaaaagagtgtgtgaattagttgataaaagagtgtaatggaatatgattgaatactattaactaaaataagtaccatataacccagtttcttgtaatttaaccctattaatattttcaattgaattatcattaaggttattaatttttgatttaaatgcatcatgtaatgcttgatttgcatcttttgtacgtttccaaatagattccaaaggatcgattaatttattattattagtattgttatcattaatgttttcattatcattagtattaatttttccatcattattagaattagaattagaattaaaattagaattagaattatttgaaatttcagtttcattatcattatcattatcattaattgtattatttgtacttgtattacaatcatttataatacttttagaatccaatatatcatttaataaagaattatccttaattattaaacttgaattaattgaggtatgagaagaatttggtctttgaatactatcagttggagttgtaatactaattaaatcatttgttgtactatttgcagattcaactaatgattgaacatttaatggttgtaatgatgataatttacccattggttcaggtattgatatagaatttaaatttgaattagatgttaatatttgaggtgttgattgtgatctattgaaaactggtaataaatttgaaggattaattaaatctgaattattaggttcagtgaatggtgtagttgaagttgaagatgggaaattagtataatatggagaataagggtatgaatgatcaagtaatgaagagactggtacttgaggttgtggatttggatgtaattgttgttgttgtagttgttgttgattatttgaaagttgttggtataggaaagattctaatatatttgagttaggtataccttgcacattttgaatattatttacactctgtatattttgtaaactgttgtatgatttaatattattgtatctacgttgatcatttgtgtaattaagaggaccattacgttttttaacactgacattattattattgatattattgatatttagatttaaactattattgacattactagcacccagagatgtcatttgaccctgagtttgttgtggcactctcaaacggagataacaatcgatctcatccaactgcagcacaaagggagtagtggaagccattgctacagcagtgtaaagtaattaaagaagtaactgaaaagaagaaaaacctgcaaaaaccgacaaaactgaaaatttcaccatttttttaactttctcttcaacccgcactaaaaaaccgttttttccaactagcgcgtctttcattatgttagatccattattattattcttagcattctgttcttagcttagtttctattagacaaggatgaatgatggtagcaatgctttgataccggttaagtcgaaattatggtctgctaagagaactgattggaataatcagaatgcgtttgtcaaatactgcaaataaaccagttccagtacccattttaccaccttctgcacctcccgtttatcaacaaccatcaaaagctttagtaattagagatgatgttaattcagaggataaagacagtaaggatttaatcaatgaattattaaaacctaaagaatataagaaaataactgtcttaccgagtgataggaaagttgaaggattaacagttgatttgttagatcatcaagtatcaggtataaaattcctattacatcgtgaaaaggttaaaccttaccaaaagagattatttaaatgaatttaatatagttaatgatgaattaaataatgattcgaattcatttttcaataaaggtgggatattagctgatgatatgggattaggtaaaacaattcaaataatttcactcatactatcaaatcaaccaaagaaaaaatcaactttaaagacaacattaatagtatgtcccgcttcattagtcactcaatggtgttctgaattagattcaaaggcaccttctcttaaagttttatcatatcatggtccaaaacgtcctaataatgtggaaatcgttcataattatgatgttgttgtcacttcatatcaaacactgtcatctgatcatggtaaaagaagtacttctcctttgtataataaagattatccatttagaagaattgtattggatgaagctcatactattaagaatagagatactaaggcgtattctgcatgtactgatgtagaatcaacgagaaggtggtgtttaacaggtacaccaattcaaaataaaattgatgaattatattcattattaagtttccttaaagttaataaatatgaaaattttaatttatggaatttgaaaatacaaagtcaattaaattctaaaaattcaaatgatataactaatgcattaacaattttacataaaatacttgataaatttatgattagaagaactaaatcaattttgattgaaaataatgttttgacagtgacgaaaaattattcatactgaattgttagattttacaccatttgaatcaaatttatataagaaacttaaaatgaaaattattaaaaatataattggtaatgatttttcaattgatgaatttaataaaggtaaattaattaataattcaaatattaatctagattatatgagtgtattcacttatttattaaggttaagacaattatgttgtcattgggaattactgtttaatcttaaagctgattcaaatcttattaataataataatgaagatgaagattcttttacaaaggaaataactaagggaatttctaatatttcaatgaataatgataaacttaatgatgtattgattgatgatgatattaataatatacttaattcaatgaaacaaatgacaattggccaaaaggaggtaaataagtgataccaatgtcaataatgaaataaatgataccacatcaacaacaccttcattacatgcaattaagattcaaagaattttaaatattttgaaaaaagataataaggaaacaccacgtaagacaatcattttctctgaatttacatcaatgcttaaaattttatctcaaatattatttaagaactaatattaaatttgtacaatatgatggaacaatggataaaaaatctaaggatgaatcattaaataaaattaaaaatgatccaacagttcatgttttattattatcacttaaatgtggtgcatatggattaaatattacatcatgttcaagagttatattatatgaaccattttggaatcctgcaattggatcacaggcaattgatagatgttatagaattggtcaattaaataatgttgacgtttatgaatttttcattaatgatacaattgaaattagaattaaagaattacaagataaaaagaaagaattaatgaaagcagttattgataaagatgcaaaatctgcaattggtttactgggtaatggattaagtaaagttgaattatttaaattacttgatataaatattgagtaaattaattaatacacataaaacttaattagttgaagttgctaaagttgttttacctgcaagacaatctcttttagcaacaccatttaattcatgacatgaagtaacggtactataaatagtttcagaaggaactgtaatatatttagttgtaactaaaccttcctcttctaaaaattgttcacaaactgaaacactttgagcaacaatattaattgcagttgtaacataagttttatcaccatttaataaagttgttggacttaaaccttcaaaatgttttgtaactgtaacaatttggaaacaatcatgaggtaaatcatctgcttgagttaatgaaagtgttgataatgttaataataataagtttgttaattgcattgttggttggtcgttgttaagtaaaaagatcattaaagaacattaagaacttaccaagtgtctaaccttcctttttatagatcaattatataacaatgatacgataattaacatggttgattaaatattagatgaaacaagtaattgatacatgtatcaagatctatgcatgcattgattaaacttttaacatgataagtttgataaattgatagcaaatagaagtgatatttcccaatgaggacatatcaatggatgttctctaaaataatactataattttgagcacacataaattaattcatattaaaaaaatgtattataaaatatattatagaagtaaatcataaagatagtaattagaaaaggtttcattaagaaaattaagcattaaaaaaagtgaaaagttaaataaaatattgaattaataatttaataccaatatttaaaatcaggattaagatcaccactaataatttttgatctttcatccttttcattccatttttgtttataactatccttttccttaatatgatttaaatatctaacataaccaaaataaacaactaataaagcaaatgctaaacaagcaaatccaatacaagtaccaaaaccagttttatatcttggagcatctttatttgggaaaaggaaagcagaaataataccaccaatattaccaaatccaataacgaaagctgtaccaactgattttctagtatgacctgaaaaatttaatgacatccaacaaattaaaattggcatacaagaatataatcccattgcacttaagaaacaacctgcatatcttgcatttgcattattacaagcaaaaaccattgataaacctgcaattgaacaactacttgcaattaatgcaaatggtaatctaaatttaaaataatctgatgaagttgctaaaattaatgataaacccattgttgctaaccaaggataaattgaatgtctttgagcttccattgctgtataacctaattgttgaataacacttggtgcaaagaatgcataagcatatgaaggtataactaatgaaaaataacataatgcacaaatatataacattggttctttgaaaactgttaaaacatctttccaagtttgtttaacttcaaaacctgaattaccttgataaaattctaatttcttctttaagaaaattctttcttcagcatttaaaaatcttgcttcttcagggaaatctgcaacaaggaaataaagtggaattgctaaacccatagtgaaaagcaccttcaataatataaatccattgccatgaagataaaccatgtttaccatttaaatcatgaattctataagctaaagcacctgcacaaccacctgcaagacaagtacaattaaagaaaaatgcaattcttcttaaagattctcttggagtataataattagccataatatagaaaattgcagggaatgaaccagcttcaaaaatacctaagaataatctagtaacaactaaacctgcaaaattttttgaataagcaactaataaagtaaccataccgaaaaggaaaatcattgaacttaaccacatatgaggtttaataactttaattaaataatttgatatgacttcaaaaatgatataaggtacaaagaaaactgttaaagcagttgcatattgattaccatgtaaatcaagttgtttttcaataccataaacttttgcatttgaaatattaactctatcaaggaaagcaaggaaataaagtaaacaaaatggaggaataacccaaaggtcaattttccacataagtttcttttgattaattgaagataaatttgctaattcttcaatttttaaatttttttcatcatctgaaagttttaaatctatttgatcattatttgtagttgaattgaaatttatagaatttgttgtattattttcaatatctttagcatttgagctaaagctagcagattctgaacctttttcggacatttactatttgataaatgaaagtgataaaaatattgaaccaaatagaataaatcactgaaatatactgactactgccactctatttatattcaaacggtaaacctgaaataatctttgataatatctttggaatgactcttaaaccggagaatggaaagtgaaaaatttttaaaattatgactattctccgatatttccttaaaagggtaattccggcgcgcttaaacaatagatagtattaaagtcaatttgctagaaaaggccctgcttattccaccacaacggatagatggatataattaattatcaaagtctcctctcttcatcttatcgtattaaaattacgtaatattataaacttaagtatacaccacacacacatttaataaacttcaagaacgtatttaccatcttccttcatttcttcaactgcctttgcagcatcaattttaacacctctatccttggcatcactctctaaaacatcttgtaaacatgcactaatatcaggaactggccatgttggaccacataaatagaaataaccatcttttttaacaattaattcctttaattcttctaaattttctctaattttatcttgaatataaattttattaatttgatctctactaaaagctgcacctaaatgagttaaaattttggcatccatataattttcccaatattcaccatataaatattcttgtcttttatgtcttgaacccaaatagaggtaaatttcaccaatttcattaccttgttgtaattgatattgtctttcttcaataaatgccttaaaaggtgctaaaccggtacctaaacctgccataataattggttgtttagttaatggaggtaatttcataattgatggtttaacactaacaactaattcatcaccaatttttaaatctgataaatatttagaacattgaccaaatcttttacgacctttattatcaatccaatcaacaacaacaattaataaatgaacttcatttggatgtaatttttgtgatgatgcaatagaatattctcttctctttaatggattaataattgaaactaattcttgtgcatttggtctaactgatgggaaaatttcaaaaatatctgcaaatgtataaaattcaacttcttgatattttttaaaaatttctccacctgatggtgaaataattttctctaataatttcttctcttcttcattagttgcaaattcaattaatgattcataaaatttcttacctggtttaccaaataaatctaaattatcaattaatgattgtcttaaagttctaatttcaaaaatttgattattatcccttgagacaacttcaattaattcattacctgtaattccattaccatacattttaataaattcatcaactaattcaacattatttctaccatgaatacctaatgcttcaccaatattatattttaaaccagttgtaccaatatcaaattcaatatggaaaatattacgattataatcatctggtgttaatctcttattttctttaactttaacaataaaattttcacatggttgatcaggtcttaatgatttttctgtaccataagcttctttgaaaattaatttctttgctaattcttcatttgcttcaactttaatagtttcattatcaataaataattctcttggatttggtttaaatgatgttggtctagtgatggtaaatggttcttcatcttcttcaatttctaattttgcccaatcttccttaaaattaataattttaaatccattagatttaatattttcaacttgatctgcaataactgatgctaataattcagcttctgaaccgaaaaattgtaaaattttagtaacaactgaatgtttatcccaatttggataattcaatgaccaaattgctgattgaattgcaattgatttagttctaccattagtttcattaacttcattaattgaatttaaatctaaaaatttaagattaatttttttatcggataaaatttttttaactttatttgaaattttcttatcaataattttatcttcatcaaaagttgattcttcattaataattaataattcaccattattatttaaaatttcaataaggttaattgaatttaaaatattaatatcttcaattaagataaaatcaaatttttcaattatatcaatacctttaccaattgttaaattaacttcaaataaacctgcattaattgaattatcataaattgattcaaatttaatattttcatcttgaattaatgaaaatgcatgagttaatttagatggtaattcaataaatttagaattatcattaaataaaaatttatattttttaacttcattaataatttttgaagtatatttagtaataaaatcatttaatgattgttcaataatattaattgagaataatccattgaaaaataatgatgccttgatatctaatttaagtaatgaattatcaataacattaatttgtttaatattagaattaattaatgaattaaataatgatgaatcaaatggtacaggtgatttaacaataataaatgcttcatctgatttattttcattaataattgaattaattttttcattatttggataaagaatattaacaattgaagcattagcattaccgaaaaattggaaatttttaaaattagtacctaagattgaattaactttttctaaagtgaaagaaataatatttaatggattaatatttaaaattgatgattttaaatcatttaataaattaatttgaaatttattaatttcatttgaatttaataaaccattaattgattttgtaatattagtttcaaaaccattaaataaatgaatattgttaatatttaatttagataaaacgattgaaatgattgaaaaaatttgatattcaaaatcatttgatgaaataagtaatggtaattttaaatttttactaatttcaataacatcattaaaatttgaaatataagaatttgaattaaaatcataagaaattgatgataattgaattgataatggtaatttttcaaattgattatttggttgattaattaaatttaatgaaaaattaattaatgaatcagtatttgttaataaagtgatgttttcattagttgaatttttcaaataacctaataataaattaccaaaatctggtaaattttcgaaattttcaacatttggtaaaacatcattaaaatttttctttccattagaattccataaattaattaaatttgtattttcatcattaatgaaaattttatttgataatgaataaattgttgataaaattgaattataatttgatgataaattatttgatttaatttcagttggatcaattggtaaaccaaatggtaatgtctcagttgctgtaaacattgctgataattaaagaagaatagttaaagaatagttaatgtacattacaaaatatggaaatcctatttgataagtataggtataacataaccaacggtgaacgaaatcaatctccgaaactgtggcgagtgaaaaatttcaaaaatttgagagagagactgtgcgcaatatcacgtgaacgcgtcttcattgatgccttttcttataacacttagataattattagatgatgatttaagacatctaaaacctttccaagaggatctaagtaatgattgatgattagatggggttggatctgattcatatgaacctcttgtaaaataaatatcatctttaatattatctaataatgtattggcattgattgaggatgatgatttaggtattgatttgaggaataatggtggtttaatattacgtttcgggaatttatgtgcaggtttggttattcttgttgattttgggaatgtattattaaaagattttaatttcatctttgtaaatgattgttcatttattgaaagtaatgatagtaattctggagtaatggatttgagtaattgtgatataagggaattaattttatttaatacttcactgttggagattaattttatatcaggtttcctaaatttattatattctgtagagacaatagttgataatttattaaatttttctaattttaaattaaataaccaattaagtaagataattaattgaattttcaatgattgatttaagaaattatttgataattgttgtttaaattgttcttcattaagtatccaacgaaattgtttattaaaattattaaggggagttattgataaattatcatttttaatatttttaataattgattcaatatatgataataatttcatatcaatatcagtatttttagtaaattgattcataagggaaatataattaataaatatattaccattattattattattattattgtaaatacttaattttttagaaatgtaataattttccatattaatattattcattatatgccaatctaatgaaattgataatttatcattaattaataatgattcaattataaaatttcttaaatttataaaaggtttataattatcaattaattttggaattctaattaataataatttacctaatgttaataattttgaacctggtttaattttcccctgtaatgaataattatttgataatttaattaatcttttatcttctaatgaattatcaaataatgaaggtactaaatgatcaataagaaaccaaagtggataagtaaatgataataattgaactaatgtattaattggtaatgagccatcattaattgataattcaatagaatcatctataagttttaatgcattatttaaattttcctccaaagtggaagtattaaaattcttacccaattcaagtatacgattatctatagacgacgacattgttgactatacagagaaagaaaaagaaaaagctataaactaaaccaaaggataataagacaaactaccaaaactgatgaaattatgaaagcagattttctttgacgagcgttaattttatttaaggaggttgtttatcattgggattgatgatattgaattggataagttggttgatatattggataatagggaatcttgtctaagcatttcatcccttgtatgtattacttgattaataagagaatcaactattgaatgttgattattaacacgtaattgttcatcaagtaaataattatcataagttgtatctgtagttgtttcttctgtagttatattatttaataggttctttctttgatgatcattatttaatctttggaaatcttgtctattacgttttaattcatctttaaatctttgtaattgattaaatttaattatgtctgatgaatcaattattcttgataaatcattaattaatgatgaaaggttagataattgagattcaattttagattgaatttctaattgtgattgtaatgatgattcatttgatgaataaattgctaataaattggataatttattagaatttgtaattattttagattttaattgagggaatgacattaagtgaaattaagcaaatattaatccaatcagttaattcagggttaagggtattaaattgacaaggggtgaatgaaagaatgtattgaattcaaatgatatattatcaataatgtatgaatacctaacttttctttaagtaattgaatatttaaatttaaatttgaattaaagtgaggtttaaaaaataatgttttacaattaaatgaaggatgtgttttgatggtgaatataatgtaataattaggtgtcaatgatgtgagtaaattgtaatgaatctttggatattatataattagtgaaatgatagttagttatataaataattatatatttgaaacatgattataagtaagaaggaataataaaaagaagagattaatagaggaatatcgatatatgagcgtatagtacttcgtaacaaagtacttacgtactttgtatactacgtactaaacttaatcaaaagccattgattttttaatttctgcaattgcaccacctggatttaaaccttttggacaagtttttgaacaattcataattgtatgacatctatacagatgacattgaattttgtaacatttcttttcttaaattagttgcagtatctcttgaatcaatcatccatctataagcttgcattaaaactgcaggacctaaatattcttgttgattccaccaataatgaaggacaagaagttgaacaacaagcacaaaggatacattcataaagaccatctaattttgctctatcttcaacagattgaatattttctctttcaggtaatttagatttcatcaatagtgtaaatatggtttaattgatttatattgtttataaaaatgagttaaatctggtactaaatctctaactatatacatatgaggtaatggataaatttttaaatcttttttggaatcagtatcaattttacatagacaagctaaagtatttctaccaccaatattcattgcacatgaaccacagataccttctctacaagatcttcttaaagttaaagttggatcttgttcatttttaattttcaatagagcatctaaaaccattggaccagtttcatttaaatctaattgataagatttcattgttggtttaatttcaggagtatcaggattccatctataaattttaaaagttttaatatttggtaatttagtagcttgagttgctaatgatcttgtaaatgttaataatttcattgtatataggggaatgtcttaaagagaagagaagaagaagagtaaaagagaataatagaatataaataaatacccaaataataataaattaataaaagatgtaatactattggataataattataaacctcactgtcactgtcactcttagtaataattgaaaaacccgtaaacggaaccgtagtgggggggggaatgtattatagtattatattcggaattatgttatattatttcctatatattacgtaatcaatattacgtaatatatattacgtaatcggtgcttacctaatactcacgtgaccattacgtaatactttaatagctccattaccatccccactttttattaacttttcagctattatcctgattatgtaatctgtattaacactactactctttaacttgttaatatcccttataatactatctatttcaatactaatacattcactctttaatatcttatttattatcattttatcacttattatcataccttcttcttcttttatttcaattccaatttcaatatctcttttattaattatctttttaatatctcttataatattatcttcaatacctttaactacatattctttatcatatttcttactctcttcttctataattaatatctccctttccatatcacctatcccctttatctctcttataactaacccatttactaaacacttcactttcacaaatttcattcctcaaactttttttattaaatttcctgtattttttcattagttataccaattttaggtattttattattaaattctttaattatatcccctttaatacctttattccttattattttcttattacatcttaattaatgttctaatattgttattaatttcattatatcttaaattaggtaatttattcattatccctattatcccattgaaaaagaatgaaataactcccttaattctcaacgtttatgaaatttttaatttttattttatttttccaattagtataccctatatactcaagacatcccttcttttaacaaataatgataatactatttcgaatacgtagatggttatttaaatatatttatcatctaattatcatattatcattacctttaatatccctattttcctataatcatctattaaataatcattatcatccaaaattaattaattatactacatttaaataatttatacattaataataatacattattcgataatttatttcattcaaataaaattacttcaaaattcccaattagtgaaagatctttctcctctttaaatgatgatgtattccaatatggttgtagagatccaataattgaaagttcaaaaaataaaagattaaatgctgcttttgtcgttttagctagaaatactgaaattgatggtgttatattaagtatgcgttcatttagaacgtagatttaatcaatggtttaattacccctggatattccttaaatgatgaaccttttaatgatgaatttaaatctagagttgaagaagtttcaagtggtgaaattaatttcggtttaattaattcattaaattggcaattcccaaataatctagaaaattcaccatttttcaatgaagttgttgaaaatcaaggtgatagaggtataatgtatggtaatatgaaaagttatcataatatgtgtagattttattcaggtttcttctttgaacatcctcttataaaagatttagaattttattggagagttgaacctgatgtggaattttattgtgatttaacttatgatccatttttggaaatgaaaaaaaataataaaaaatatggttttacaattacaattaaagaattaattaatactgtccccaatttatttaaattaacaaataaatttataattgaaaataatattaaattacctgatacttggtcattattttcaaataatatgaaatttttcaaaggtgaaaatgaaattaattataaagatgttaaaaatttagatgattttttcaagaatttaattaaaaatactaaatataattatgcaaaaaatgtgataaataatagtgacaatgataaacaaataccttcaaaattattatcaaaattaaataaattaataattaatcattcaaattcattaccaaaatcaattaatgaaaaatttaatgatgaatcttataatctttgtcatttttggtcaaattttgaaattgcatcaaatgaattatttacttcacctcaatataaagcttattataaatttttagaagattctaatggatttttcactgaacgttggggtgatgcaccaattcattcattagctgctggtatgttcctcaatctttcggaaattcattattttagagatataggttataaacattcaactataggtcattgtccttataattcaccaaatcaattaccttatattccaagtgataaatttaaacatcaagttttaccacaagatgaaatttatatgtcagaaattgatccaccagttaagaatcctttaattaattctaatttaggtgcttcaggttgtagatgtagatgtccttcagatcatagagaagttgaaaattcaggtggttcttgttcttcactttggttaaaattaaatgataataatttccccaattcaaatagtttaactaatcatcaacttaatttagatttaattgaaaattgggcattaaattctcttatggattggattaataataatggaaatattgatgattgggaaatttcacaatctgaaagagatttattatctaaaaatgttatataatctatgtaaataaataaataaataaatactaatactaatttaatttttcttctccttttcaacttcaacacctaataaaactaatccactaccaatttcaacaattacaataaataatgcaccgaaaattgctaaacaataattacttatactaactccaatatctaaccatgatccttcacatttaaccatatagaaaaaccataatgaaagtaaatcacataatgaaataattaaactacttatactatattttttaaatccagattttaaattaactaatcctaaacctgtacttaataatgcatatggtataattaatttaagcattaataatgctcccattgggaatggatcaaaaattggtaataatctataaactgaatctaatgaaaatgttgaaattgatgaaatattacctgtaccgaaaaatgcaatttgaatattgaaaaatcctaaaagtgcaattcttaataattttaaattactaccccttataggaattattaattgattcaatttcaatccaattgaaaatcataattgaatataatatatagaaaaatccttcaaatgatatacttaaaattataaatgttggactcattgtaaggaatataattaaaaatctaatttgataatctttattaacattaattgaatgtccaataattggaattaaaaatgatattgttaatataatccatccaataatttgtgcatcaattggtaatccttctcttttagttaatgaaacaactgatttagttgttgaataaatagatattaatatgaaaaagatttgtaattgaataagttttttagttaaattattcattttctcctttaataatgaatatccaataataccaataattgtcattaaaatacctgaacaaataatcatattaattgattcaactttaactggattttgaattgggaaaatacttaataataaacatgtaataaaccaactaattgataaaacactatttttcttatttgcaaaaaccttattcttgaaagactaatattggatataatattgataaaataatataaatataactaaaattttcacgattttcaaatccaattgcaattgataagaaaaataatattgtacaaacaattaataataatctaataaataaacttaatccttgacaaaaaatattaatacctaattgaatatcattttgatatttaaaaatttcataccaaaagaaaattgggaaaattagataaaattgataattaattggtaaattttggaaatagaaataaatatgaaattgatgaacctaataaaataaagaataatttagtgaaaattgatgtaccattatttgttaatttatcatttggaattataaataattgtaaaaaaattgtaaatgaataaataatccaaccaataaatcctaatgtaacaacagttctaatcattaaccaattatatttttgtaaataatccatacctttaataatttgtccattaaaagtttcaattaatttaattgtctctttttcaacttccattaattcattaccttgtaaattttccattgatttaattaatgatttaatttcatttttataattttcaattgattttttttcaaaatgtgggaaatttttaaaattaatttgatttgatttaacttcatttaatttaacaatatattgttctaataaacttaatgaattataatataaaccattaattttattaatttcagaatcatcaatgaaagataatggtaattcaccaacattattcattggataattaagaccaattaaataactcattaatggtgcaatatctgcttgctttatatcatttctttgaatattatctaaattccaatttgacatttcacttttctcaaattcatcattaccaatcaaaaattgattttcatttggattaatatattttggtttattacaacctttaccccaacaaataaatggagttctagtattatttggatgaccatcaccatgagaaccaaaatcactcataccgtgatctgcagtgaaaatgaaaacactttcttcatcattgaaaaattcattaactttatcaactaatttagaaatttcattatcagtatatttaatattatcataatattcagatgaataaggtctataactatgacctgcagtatcagtacctaataaatgtaaaaagaaaatattaccatcttgtctaatttgatcatttaaattttcatcttttgttgaattatcaaataattgataaacatgattgaaaacatatttatctaattcaattgaacttgttgtaaaatcttcaaattcatgaccatacatccaaatatcaactttaccatcaattgcaccttgttcaaacattggtaaaatatctggagaaccaaatgaataagtatgagatgattgattgaaaactgaatcaaaatcaacgggattttccttccaaccttttgtaactgcactaacatcttcataaaaacctgcaatcattgcaacatgaccaggacgtgattcagttggcattctagtatgtgataaaccataagtaccattatttaaaataattgatctaagaaatggagctaaatattcaaattcaccagattgaggattttcaattaatccaagtgttttatcagctctttgaccatcaccgacaattaaaaataatctctttgcaggtggattattaataattgataaatgttgatccattccatgaactaatggagaaacgaaataaatatcgaaaattgaccataaataaaccaaatggaaaataacaccaattgccaataataaattcctctttgaatgtactgaccccatcattcaacgtctacaacctcaactaaaagaggtaaaccaaaccaaaagaaaaagaaaacaacttaccatatgacagaaaaacgacacgtcagaaagggaaacgtgattttctataaatgatgcgctttcccctctattgatgacaattaatgattgacaattgattgataacttcttcttcttttgaaaggacaatacaaactaatacaatggtttctgaaacatttacacaaaaggctgaagcaatctctaatttaccaactagaccatcagatgaagaattattaaatttatatggtttatataaacaagcaacagttggtgataatgaaactacaaaacctggtatgtttgattttaaaggtaaatataaatgggaatcatgggataaattaaagggtatttcacaagaagaagcagaatctaaatatattgcattagttgatgaattattagctaaatattctaattaattagttaagttatataagttatttagtcttttctttaatataaatattattaataatatttaattgattattaattctcattgagaaatcaatcatcatataaaatggtaataacattgttggtgtatataaacttaataaattaattaattccttattattaagtccatgatcattaccttccataataacataaataaaacaaactaatgttgtaaaacctgcattaaaaccataaattgttaaataaatccaacttttaaatttaaatgatttattattagttaaataatgataaactgcataaaagaaaattggtacttgaaaaattaattcaaataatacaaatatttgaatccataatggagtttcaattgctaaaaaatctttattttgttcaatatgaaattcagagagagttttctgaatattaatttgatatttagttggaataacaaatgttgcatccattaataatgtaattggtatatgaattaagaaatagatgaaatagactgtatccatggttatcaattgataatatattatactattctatatcgataagtaactatccatctgtagaagtaatttaaaccttccctattcaataaagtgtgaaagtttaattattataagaaatcttctattaaaaaattaaatattcaacaaaaataaatgccacttgccagaattgaactagcgacctctgcattacaagtgcaacgctctaccactaagctaaagaggcaattatatcttatttaatttatggtctttggcatcgtgcgcggctcacgtgacggttttttcaattttattaatatcttaacaattactggatatttcatactaatttttggatggtaatgacagttttactttttctatacagtgaataaatttatatgcccaatactataaaaaatattaaagtaaaaatataagtggtagcacaattatgggattaaaaaaattaaaaattaattataacccatgaaaaaagtaacaaagatgttttaaacggttggcatttagagctttattaagtgtttcctgagaattgtcatttaagaattcgtataatgtgtaaacgttataaatatgaaaaagacttcaacgataaataaatagtacaatttttcacatcgtgaatcaacatcagtaaacgtggaactgaacatgtttccaagtttcccaccaaaagagacggttgttagatgttgacgactataagtaattttctctttgcttacttctctaccgtttattattatttgccattaactattcaggattattagacatttttgaagatatgcaattgagtagataacaaaataataaaattcaaacattggtaatattattggtcaaacacaattttttttaggattttttgaaactggtaaatctccagcattacaacaacatacgttatccatgtatttcactattgaaaagcaagcaattgccaattcaatttattatatttccactttaggtttgagtgtccccgttggttttattacttatggtttagattttacaacatgttaaagaccttggaaatggtacagattaattataggtgaaatgcagtttgagctattattgtttgagcatctattgtaattgttggtggtattattgcagtaaccatttcatataaaaacaaaccaggtattattgatggtatttatgactggtacgaaaggtactatgtatattcttggattggcttacaatgctacaaacgctcaaggttataccaaaagattaacgaggacattgatgtggatgattggttattcaattggtaatattcttgcaccacaaattgcttttaacttgaaacattcacccatgaaccatattaaaaagaataaagcaaaatctggctttgttccgtcagacaaaaacttgctatgcggatttcgcacggatttagcacggatttagcagtcgttgtaatagcaacagtactgaaattttaaacatgtccgaaattacttaaatagagtgcaaacaacccaatgggttaaaaggacatgctttggatgcttcagtcttttgttaatttgttaatttgttaattttttattatataaacaaactcattttaaacaatggaagaagatttctcagataaattatacacacgtcttggtaactccggtcttagaatctcaagaattgttgtgggatgtatgtccataggtaacaaacaatggggtgattgggttcttacagaaaagaaagaagtttttgaagttttgaaaaaggcttatgatgttggtattcgtacctacgataccgcagatgtttattctaatggtgattctgaaaggttacttggtgcattcttaaaagaatacaatattcctagagaaaatgttgttattttaagtaaagttttctttccatatgatgataacaatcctgaattttcatttattaaattgatgatgaacaaggtcaatttacaaaaatttcataacagaattggtttatctagaaagcatattcttgacgcagctgaagcatctgttaaaagattaggtacttatatggatgttttccaaatacatagatttgatccaaatactgaaattgaagaaactatggaagctttacacgatgttgttagatcaggtaaggccagatatattggtgcttcatctatgagagcttatcaatttgtcaatatgcaagcagttgctgaaaagaatggttggactaaatttatttcaatgcaagattatttcaatttagtttatagagaagaagaaagagaaatgattccttattgtaaacaatactggtgttggtcttattccatattctccaaatgaaagaggtttattaacacgttcattaaatagtgaaggtactttaagaactaaatctaaaccagaaaatctttccaaggcaggatattgaaattgttaatagagttgaagaaattgctaaaaaacatggtgttgcaatggcaaccgtttcattagcttgggttttacacaagggtgctaatccaattgtaggattttctaaacctgaaagaattgatgatgcgttagctgcagttgatctggaattaacggaagaagaacttgcttatttagaagagccatatcaaccaaaacctgtttcttttatgttggaacaaaagaaaattgaatttaattagccgtagtttctaatataattcttatataacacttatataattacaattacataatcatgaataaaatttataacactggatgcatatatctatagaatattaacactgtatgcatatagtgtatatcttagataagaataagaataggtaatattaatttaaaaataaagataaagatacaacacgtcccccatgaaaatgagtaacttaaattaaattaaagaaccgttaataggggaactattaaaaacgttatcaaagactctgaaatatgatatcataatgatatcaataacatcattattcactatcaattataaccatcaccggggaaacaatgaattattaatgcattttgttgggggtgagaaccgggggaaccggggtagaaaattggggggggggggggggggggaaatcggggaaatacgaacaatcaacttagtgacttgacccactcgtgtacatcataccacctattaccgaaattaaacgagatctctacattgttaagagatcttaaagaattactatatccgcataattctacttcagtagagaaaatttaaaagattcctatatgcataattcattgcataatcatgtaaacaacaattactaattatgcaagagactttaatgcattagaattcttggttaactcatcagctgcaatggaatgatgtattaaatgtaactaaccgtcatgtcattaagttaatattttcataatccttaattttcaacattaaatttattaatagtgaaatatttatttattttttgattgaattatttagtaaagtatttttataaattgataatgaaaagttatatataagcacccttaagtgttatataattgtaattataattcactctcttctctctattcattgaattaattcaataaaagcttctctcttctaataaccctactacattaatatattactatattatttcaattattatatatcatactatttctatctatactatatcatcatagatatagataaaatataaaatatatataaaatacaacagctatgacaccatatataggtaattcacctattaataggtttcaatatgataatcaattaacaaattttattcaaagggataagtagtccaactaatagtttaaatagtaatttaaataataatatttcaaataataattattcatcaccatatatacccaattataatagatcagatgattatttgatatatcaacaacaatataatagcccacattcacatcaacaacaagcaagattttcaatttcatcaatttcaacaacaacagttacaacatcaacaacagcaacagttacaatatcaaaacaacatcaacaacaacatcaacaacaacaacatcaacaacaacaacaacaacaacaataccagtatcaatatcaacaacaacagtatcaaatgcaattacaataccaacaacagcaacaacaagcacaagcacaagcaagcacaagcacaagcacaagcacttgcaaatgtgcaggcacaatcgcaagggcagcaagtacaacctattcaatcaatacaatcaatacaacaaccaccttatcaatataatttacaatattattcaccaaatcaatttatatcaaatgatgtcaatattaataataattataatatgaatattttaaataattcaaataatttacaaataaagaggaaatataaattatggtcagaagaggaagatttattattatatgatttaaagaaaattcaattattaagttggaaagatattgcattaagatttaacgatagaacattacatgcatgtcaatttagatggaggaaaattagtcctttttttataaatgaaaataatacaattaggattaatattaatagagataatgaaagtaatgataagtaatgatagtaatgatagtaatgatagatagtgaatgatagtgaagatagtaaagatatcaaagatgatattaaagatgatattaaagatgatacaaacgttaaagaaactccatatcttccaccacgtacgaataatatcagagatatacttaactgataaatatatgtaaattacttttattctatattctatattctattctattctatactctatatatcaataactcataccttacccaactactttactccacacatattaatgtaatgtaatatttaataaggatacttatatcatatatcagtaatgtacaacttattaaaactgtctataacctcgtaaaattagcaattttcgtcaggtgttattcttaaacccgaaagggctcagcttttttataaacgtttcttatcaataattaaataattcgtattgttttaataacatttccatatttccgtttatggtaaatgaataatgaatgtagtattttaattattttaattaattataacaatgctatataactagttaatagtactagaattattaatatctaacatatctgttgtattatatcaagagtatgtatcatatcaataatgtttttaaaaagtgtcaaatttagagaaattcgttaattgtttacgaatatttcagttgaaaattttcctagttgttcttctaattattataattaatgttatggtactattgattaaaatattttaaccatatatttttcactaataaattctttcaattgtcgaggagttgtccattcgaatccctgtgatagtacagtaactcataatccggaattgaccgattgtttactaactctccattttcggataatcttcggataatgtatgaatttaaggtatataattgataattaattatcgttattaataatatcttccatcttttgagatgttgataaattgtatttaatacctataacaaaatatgaaatttataaaataattaattatcgttattaaaaaactatataactgtgaaatatagcataaaagaattaaacgaattctagtcttccttatagaaagacattatttttattgtcaaccggtaataatgatattaaacgatggccatttattttcttctttaataaattttaattattatttaataaattttaattgttctttagtagaatattatcaatttatgattacataattagagaagcattacagacgcgactatttgtttaaatgtcgaccggtcgagtatattgatattacgtaatgtcttttttggtatattacaattattggatatattatatatcattatcattaacatgattcagattaaaagtaggataatatgtttagaataaataataatataaaaaaaaagtataataataatatagtatataaaatttagattagagataattacaattattttttattttcatcaattttttcatctaatacaggttcaggtaatttaaattcatttggagttgaatcaattccttcaccaatttgatcataaactgatgaaccaactgaaaaatttctccaagcttgagttaattctaatggttcataaacaattcttctcttttctgaatcatatctaacttctgtataaccagttgttgggaaatcttttcttaatggataaccttcaaatccataatctgttaaaattcttcttaaatctggatgaccttcaaaaaatataccaaacatatcataagtttctctttcaaaccaattattacctggatataatggaactaatgatggaattggtctaacttcacttgtataagttttaactctaattcttgaattaaatctaacacttaataaatcataaacaatatcaaatctattagttctatttggataatctgctgctgtaacatccatacatgctttaaattgtgatgatgtatgatcttttaaaaatgttgttaatggaattaaacctgatggtgatgtataaattattaattcatctttccaaactgaaaattgttgaacaaattttggtaaacatcccataatataagtaccaaatttatgtaattcctcagtttgaactttatatttttcctttggattatataatggtacatttaattctttaaaatcaggtcttggtaaatctcttggatttggtaaatctttaaaactaccttcaattttattatttgatgtaattgtacttgtaatatttaaacgtggtgaaatattagtaaatgttctaatacctttgattaatttactattggttcctctacctaacatctttatttccctttgtactatatagaaactctaaactattcaacaacgaataagattgaggggaattgaaattaaacattaagaaattcaattcaacgaatttcgcaaattttgaattttaaaaaattattttatcatggattacgtaatattatacattattataaattctcccaagattgaataactgaaactgcattcatacgtacatctcttgatttatcactaagcattgaattaccaatgttaataacaattctcttatatgggattatcaatgggatttcaaaaattgtcattaattttaaacattttaatgaattaatcttaatttctttattattataatttccaataattttaatacaattattaataattgtttcaatatatggtttaatgagtaatttacttaaatctgattgttcatttaagatattattaataattattgtaattgaattaataatatttgaatctttattagttgtaattgtattaattaatcctggtaataaatcttttaaatgagatttatataattcttcaggtaaataagttaaaattaatggtaaaataatttcattataatctttcctttgtaaacaaatttctaaaactttttgtttccaaatatttctaattattaaattacttatagttaatttattattatttctaatcattaatgttgatttttgttttctataaatacttattaaactttcatttatatctttttcattattttcatcatcattaatcaatgtaaatataattgaaattgttttcaaaacttgtttaaatgttaattgatttaatatttcaaataataattcaattgatttactatcaccttttaaaattaatcctaataaactccaaattttaatttcattattaatttcacctctgaaaacttcacaataatcattccaattaaaatatttattaataattactgtaataccaattaataattgtaattttgttaatccattactttattattaattaattcacttaatttaattgtaatttccttaaaatttggaattttaatatcattatctaatccttgaattgttaataataataatggtaaatgattaatatctggtttagtaatatttaaatcattattttcaataggaatttcatcaattgataataatttatgaaattgattgattaattgaataattaatctctctgcattttcattactcatactaattgtaaaacgacgtaaatattttaccaatataatgaattaataaattatcatcattattagtatttaagaatgttaataaaattgaaataaatttatttgaaattgaatctgtattataagtaattggtaatttattaaataatgaaactaatgaatttaataaaagttcaattggaatattatttgttggtgaattaagtaaattaattaatcttaaagaagatttttcaattaatgaatttgttgatgagaataaaataatataatcaattaaaatacattgttgttttaaatttatttcattttttaaaatatttgaaagtaaattattaattatattaattgtatcattttcaaaatttgattttttagaaattttaacaattgcattaattaattcagtttctaataatttattaaaatcaattgaattatttaatgcattatttaataaattttcacctaatttactaataagtaaatctgtttcttcattgaaaagtggaatttcattattattattattatcattatcattattattaagaattcaattcaataattaattgaattgctaatatttgtaatgaaatttctaaatttgatgaagatagtgaaatttgtagaattgtgaaaatttcatctttaaatggtattaaatgattattaaatgatttaaaatatgataatgcaattaatagggaacgtttattctttgtttcattatattcattagagaataaagaattaagagattttgataaaattgcttgagaatcttgttcattattagaatccgatattaatgataatataagataagattgtaaaaatttagaattattatttgagaaagttaaatttttagataaatcatcataaattaataatttatcatcataagataaattttttgataatgaattaattgtaattaaagaatgataaaataaattatctgattcatttgaagaattttcataatatgataaaatattatcaattgaaattaaattaattaattcttgatttaagatattatatttaattgtattccaaattaaaaggaaatgattatgaattatatcaattgaataatttttagatactattgataaagtatttaagatatcaattttaacattaattgaagaagaagaattaaatttttcaattaaattagggaataaatcatttgcatataaattattagaagataatgaattattaagtgaatctttgagtgaagaaattttcacattttgtaaatcatttgaagatttgaatgaaattggataatatctaaacattgtatcaaataatggttcaataaagttatcaattgataaatttttagaaattttctgtaaaatttggaaaattaatagtaaattatttggatctttttcattaattgaaattttaaggaaacaatcaattgctaaatcatttgagaaattatggatattattaggattaatcaagatattaacaatttttaaggcagataatctaattgattgagaatgtaattttggattaaaattatcaataaattgaatgaaaattttatcaatattatcaatattattaaaatatttcatattaattagtgaataaattgaagataaaacatattgaattacataaatatctaataattttgagaaaaggaaatttaatagtacatcaatatcatttgggaataatttagttaaaggtaaattatttaaaatttgacttaataaattaaatgaagataatctaatattatcatttgttgaagtaatgtaaatttgtaatgattgaattaaatctaataatgataatttattaaattttaaataatctgataattcaatgacaatgggtgattgaattgatggatcagatgatgatataaactgattaattagttctctatgaccagacatgattttgcccttgaaagaggaagtgagttgagattattattattaagatattattaagattattattaagcgatcaatgaaaattttggtgaataaagtggatattattattatactgggatattgatgatatataagttactgaaataaaataaaatacaaatgttatatagataaagttatattaagagttataaagattaatcactattagtattcttcttctttttaccaaaagagaagaaacctttctttttttcaacttcaattttacgttcaggagcagtataaacaccttgttcaacgtattgattattattactattcatattattattattattagtataaataggttgaccatattcatcatattgtacttgattattataattattattaataccaaaatcatctctaactctccaacctaaaatatgagattccagttgttcatgataaattggatcaccagtaattgaatattcaaaactacgaattgtatctaaaggtctttcatctcttgatctagttggatttgaaatatcaggattaataatttttgcaccgaaaatatcagttaaaataccattaccaattgaagaatttctattatgcatatttgaatcttcaaagggttgagcttcattcattgcatctaaaattggatcatgtaaattttgagatcttgttttcattcttttctcatcttcatcagtaattttagtatttgatgatttatcatcattatttttcttaccaaataatcccattattattgattactaccttaagaagagaagagagtataataaaagacatataataaacaaatataatagatcagtataagaatattaataagaatttttacctggtattgattcatttattacagtgggaaattcgcgtttcttattattatagtaagtctattaataaattcatttatattacgtaatctttaaattataatattccaatcacgtgactattattacgtaatagtaattatcacgtgatcttatttggttgagcctcctttatatgattaaatttcccttttattttttatttacagtttacccttttgagtaatattattattattatattattcttcattttcttttgacaattattcttttctaaatactcttttctaaatcctatttctatttctattattattattattatgatgttaaatacaagatctaaaattatcaatattagtattaatactatgtcagataataataataataataataataataataataatcacattacatcattaaaaggttcaaatatttctcttcaagatacacttataagtaatataagttctaatacttcaaatactactacatcatctctatcatctagtagtaaaaactacataatgattaataatttaccatatccaattcaattaaatttccctgctaaaatttctaattcttcttcttataatcaatatgataccctgattcaattaattgataattatatagattaaaattaaaatcgtaaattgaattgtacatacataaatattataccttttatataaattaatacactcattttttaatacactaattcattccattatagtacttaattctccttcttcattaccttcttcctcattactctcttcatatctattatacaatgtaatggttttatcatttaattcaatcttggattctttcctcattattaaattcttccataaatgatgtcctttactttttttatcattatcttcttcattagaatcattattctcctcttcattaactaatatagtagaaaatctattcttattcctattaataaatgaatattcttcaggtatcgaattaacttcatccagtgctgataaattcttccaaatctcacccctagtatcatccccattattatcttcttcatcattttcatctttaagacttaatttatcttcaatatctgatgataaatgatgaaatttaattgatctatgatttcgtaatatacttgatttaactggttttaaattaatttcaatagattttaatttagtatcttgctgtgttttattattaattatttctaataattcctttgataattcattattattatcactatgtattgatttatttgattcatgatccatatcatttatctcaatcactggtatagtataatcttcctcctcttcttcattataatcatcatcatacccatcatactcatcatactcatccacatcatctccaccatcttcataatcatccaactccaaacttcttggtgccttatattcataatcatccaattctaatccctttggtgctctatattcataatctccatccccatctccttcatcatcatcaaataaatttctattaaataattcatcagtttcatcaatttcttcataatttatataattaacatcttcatcgaaaatattaaccctcttagatccaattgatacactatccataccattttctaaacctaaatttttcaaaaatttataccttaaattttcattctcctcattttcaacttgttcattacttttataaaatttaattgatgatgtcctattcctaaatgaaaattgtgatgaattttcatcatctgtagattctccactatattcattattattatcattactactattattattactattattattattattaccagggaatggttcaagtttattggatttttcaattatactaactttaccaactttttcactttcaattaatgaaattggtgtattaacttcatttgaccaattatgtatcgatgtaccaactatcgtctcacttgttggtaataaactacctaatgatcgtttctttttgatactttttaaattattcccattattattattattattattattattattattattattattaccattattattcttattgtaaatacttaaatcagttaatgaactcttatttttaaggaaattccttatagtattgaatttcttattcggtgatttagttggtgagttattggttacatatactggttgatgtaattcagacatggtttgtttaaagaaagaatgaaagtaaagattattattctgttatgaatgatgacatgtttttaaaaattaaaaaattactttttttatcatgatttcctatttaggaaatttaattaaaagttattttttattatgtactatattactaaaattcaaatttttatacagttataagtatatataatattgtatatgcattgagggtctaaattatttcttctttaacataatttgataaccacctaaacttaatttttcattacgttctaatattgaattaactttagttgttaatcctcgtataatttgattaataccattttctttattttcaaaaataatccatttactattattatcatcattaatttttaaataacctttaatttcttcatttgaaattaatgaaccaagaataccacaaatatcatcttcatttaattcaaatcttttagataattttttaattgaataatttttaataatacctgcattaacataagcccaagttttcaatgattgaaatttacataatttaattaacatttcctttaataattctaaaccattttcaccattttcattaattgttgaaatacctggcatcataacccaaacttttaaattacttaaaattttagaactttcaaaccaattaaatttaattaatttatgatatgcatcaaatatataatctcttgtctcctctggtggaccttggaaatattgtctttcagtataatctaaaattcttttaaatgatcttgaagtatttttattaatattttgtgattgtgattgtaattcattatttaataaattatttgcaccattagttgaactttgatatgattgtaatgcaattaatggtacttcaattaataatgatgaaatgtaataaacaatatcaactaattcaatattaacatgtgtatgaaatggtacaaatttaccattttctgaaatattattagtatttaaattattataattattaaattgattattagtattattaacaatattattagtttgattatttaaattattattaaaataaattctaccttgacctaataaatctcttgtatgttgacttgtaacaacttcatgtaaaataatttgagtttcttcaattaaacctgaacggaaagctgcaagacctaattgaacaattgcacgattaaataaaacttgaacacctggttcagatgtatgaatagttgcttgaacatgagttaaatgtaaaatatctcttgctttgaaaaattgattagtaattgaataataatatgattgcattaatgcagctctctttctataaattgatgatgaaataccatttgaatatttataaatatgtgaacataatgaatcaattaaattatttgtatttaatttatttaaattttcatcaatttcacttgaattaatttttggaatattatcaatattattattattattatttaattctgaaaatataattaatttaattggtttataataaatattttctaatcttttaataattatacgattaatttgttcaccttcaggttttgaataattatcaattgaaataattctagttaaataagattgacatctaattataattgaatataattttgaatcattttgtaaagttttaatatattcagaagaatttggatcaatatataataaatgagttgtcaattcatcacttaatctttcaacaaatgaagaaattgaaccaccaattaaatgtaaaccattttcattagcaggtggaggtttagtaaaattatcatttgaaggagcattttcagttataacataagatttatcattatctaaaatatctaataatttagaaatatcatttaatgttaataaccattcattaattgacataaatttatccttagaatttaattcataacgtaaagaaattaataaatttaaaataataattttttcataagttgaatttgttaaatctaataatttattaagagtattaagatgttcattaagatcaataccctttttaccacgtgaatcaataattgattgaacaataaagaataaattttcagcagatacaattaattgattattttgatcttgattttcgttattaattaaatttgaatcatcctttatattttcataagcttcaggatctttcttataagttaaaacttcatcattataagttttaacttctctcttaattttttgttttaaaatatttaaacttttactttcacttgatgaaagtacttttttattattattttcttcttcatcatcatcattcttagatttattaattaaatcatctaaaattgaaattgctttaatataagatcttggaattaaaatatgatattgattatgtttataagctaatttaaataatttatcaaattcattaccaattttaacccattcttcaaccattgataaattttcaatattatttgataaatttaataattcatctaaatatttttcctttgcagatttaacaattttcttttcatcaccagaatctgaatctgaatcattaccacctttaaggaaatctttcttaaggaaataagatctacctcttggaggagcatcagaatcatcagaatcagaatccgaatcagaatcatcatcattactccaatcatcagaatcatcatcatcatcatcatcatcatcatcaccagatgcttcttcaacatcttcctctttctttaattcaattttttcatcatcagatgaatcagataataattcctcatcagaactatcatcatctgtatcatttgatatttgaatattaactgattttttattttgtaattgttttaaataacgttcatcatcagaataatagagagactcttcatcagaagaagtatctgactcatatgaagtatggaaaaagctagacatggtgctaatacttaatatccaattacttacccttgtttatcgaaaagaagtaaacaattcttctaaaatactttacttttaaatttgccaacgacaacgaagtggaaaactgaaatttgaaaattggaaaaattttatttttttcttcactgtaaaaaatatatttaaatacacatctctacaccaaatactacttactattacttactatctaagacgtaaaccactgccagttgcaccaatttcactgatttcagtaacattacatatcttacccttccatctactaccatatgcaactcctaatattttctcacgtacaatatcactatacaatggaacaaaatctcctgcacagatttcaaattcttcaaatggatcaaaatcaattctaatagcatcagttgcaattgaatcagattttgcttgaatcttcattgcttgttcagctctacttccatttgacataatctttaaaaattcactcgcaaaatatgatgccatattataattcttagctttgaaattttccttcattgcaacttgtaatgcatttaatctatgtgatggttgtaatttaacatgtgtaaaatatgatgctaattctaaatttcttttaacttcatcaactggtaatgatcttctagttaattcaattgttaatcctaaaatatattctttacaaatctttaaaatttcaaaacatttctccttcttttcttcttcatcttcctcatttgttaatgataatgtcgcaataatgtaaataatctttctgaaaatcttaatcgattcctctaattgattagatttaaataatctataaccttcttgaactaatttctctaattcttcatatcctggaacatatcctaatggtttatcttcattaatacttgatgaattaatataaactggtaaattattattctctaattctttattttcatctatagtggaaatacttaatttagatgatgtataaatttccataaaacgttcctttaatggttggaaatttttaatacctgcttgtttatttaaaatatttgcagcaatttcaaatttaccagctgaaatatatgatcctgcagttttagaattcttaatccaatttctaatctcttttggtaatttggaaatttcaattaattcttcatcatttaattcattaatttcagtattatcaatatctaattcaacatctaattcttcatcatcatctaaatcccatgcatcttcaacattaccatcaatttcatcatcaatatcttcatcaattaaatcaatatcattattagatgattcattaataatatgtttctcctcttcattatcatcaatctttaaattactaacatcaccatttaaaatttgttcaaaatatgataattttgcttcctttaatggccaattaatattttcttttgttaatttattaattggttttaatgattcataattataattaatttcagtttcctttggtaatgaaatattatctaatgaaacacctgattcatttaaaatttgttcagctaattcatttaatccattacttttagcagttgcatatgctaatggtgttaaaccggaattaagataaattgaaattttacgttcaatatcatttaaataaattgaatttgtaattaatgaactaatatcttgacgattttctgcaatattagacattttatttaatttatcaaaatctccaattgttaaataaaggaatgataatttatctaataaatgtaattgttgataaactaattcaacaatttcaatattaccttgaattaatgcttcatttgataatttttcccaaacttttttagaattaattttctttgcttcaattaatgcaacatttaaattatgacattcaattgctaaatcaaatctactttcaggatcttgaacaaattgtaatgcaacttcaggataacctgattttttcaaatatgaaataatattttcaccaactaaattagaattagaaataattcttaaaacttcattaaattttttattaattaaagcttttttaaatctatattcagttggatcaattttaattaattcaatttcaccttttctatttaaacaataacaatttgaattattaactttagtaatataaatagtattatctaaagttttaattgtacctttatcaccatttaataaaacatatttaatatgatttaaagttgaataaattaaaacatttgaatcatcccaagcagcagatttaattctaatagtttcatgcattgacataataatttcaaattttttattaacaattataattgtatgttttgaataaattgctaaatattgattatcatttgaccaaactgaatattttgcattattcatttgaattgaatttaattcttttctttgttgaacatcatataaaataacatttgaattttttaacaataaaatattaccaggatttgcaggtataatatctttaacatcatcatctaaagtaattgattttgtaatattattatttaaatcatgaatatctaatttatgatttgattttgaaaatgtaacaaatctatttcttgcaataaaataagcagaatttgccttaccttcacctttaattgaaggttctaatgcaccaacaatttcctttggtaaattaaaataagaataaataccattatcagcatcacctgattgaattaataatgaattttctgatggattataagaaatatttttaattttattccaaggtaaagaaatttttttcaatgataataaaggtaatgaaatattatttgataaataattatatttttgtaattgattatcattattaatgaaaaataattcttgaattgaattatttgtaatatttaaagttgaagcaggtctttctctatctaatttgaaaaccattacaccagaatcatgacaagcagcaaataaattaatatttggatgagcaacaatcatccaaaatctatcattttctcttttaaattgtttaacgggagatcttgaatttaaatcccaagttctaattgttttatcttcaccaacagaaataattaaatcttcagttggatgaaataaaacacaaggaacattattagtatgacctctacaaccatcaacttcccaagctcttgaatcactcattctccataatttaactgatctatcatcaccaccagaaataattaaaggtaattcaggatgaaatgaagcccaattaacacctttatcatgaccttctaaaacatatttaacaacagcatcagtattaccaaacatatcttgttgaggaattgaatttctattatcatattgattcatcattgaagaatgattaccataaggattattaatattattattattaattgaatttgaaggagctgaatgttttttaattaaattagatatatcccaaactctaacagtttgatctaatgaagcagaaacaattaaatcttgctttggatgaaattgtgcacacataacataatgattatgacctgtaagacaagcaatttctttcctattttgccaattccaaattctaattgtttgatcatcagaagctgaaataatccaaggtaattcattatgaaagaaaacagttctaacataatctaaatgaccatttaatgtaaacatacattttctagttttagttgaccaaattttaattgtataatcatcaccaccagaaacgaaaattggttgagttggatggaaagcaacacatctaactggaccatcatgatcatcaaatttatcaattaatgtacccatacgataatcccataattgaattgttgaagaatgaagtgagactaataaccaaggtcttctaggatgaaatgcaacacctttagcccttgaagacttagattcaaactataataataataaaatgataatggtaatattatgttagtattagtacacttaaaagatgaattgagttattacatatagtatacataccttagtaagcatcttcatctctgctctgttgtagaataagaagatccagagaagaagttgttcaaaagcaaaagccttcactactaattaattacaaaacaattataaacaacgcactttgaaaaaatggacacatcattattaatattacgtaatcctctgtctcttattactattactattactattaccatttaaccactgatccatgctctttaggaactcttcaatgttatgtccaactatatctctaggtatggagtacttgatcttattggcattgtgtttctctctctttaatagtgccttactgttaacatacctccattgttcatgtaaaaaattaactaaattctcataacatttaattccataactgctatcctcccctaggtttatatttatattctcccttaaataatatgctataatccaaataaatttaataaaattagggaatttaaattgatcattaactctagtttccatttctatcttatgtgcctttaaatgattctctaaacttaataaattaagaaaattacctccaattattaaactatccttaactgttaaaactgaatgaatccacatacttggtaataacagtaaatctcctggcattatatcaacaataaatccattatttaaataagcatttggtaatttctcatcttgttgcattttaataaattctttcctattatattgtttaattaatgatgggaaccaaattttattttgattatccgaaagacaccatttactatatgcttttaaattagaatttaatggtggtatcattaaaaatttcttatgtccacaaatgggggaataatacactgatgtacctgcaaaatcaatatgaaaatcagtaaatgaaccttcaactgacattaaaatatatttttgaacttttggtttattaataccattcctaattaacatttcacttaaattttcatcatttccctccccttcattttcaaataatttactaattatatctaattcttcaacaacttttggtattttaatttcttcaccaagtttggtatcacttatctctaaacttataacattacgtattttatcacgtttacttttctcagttgaaaaatattcacaccatcgtttcatatcccatctaggtgaattattttgtgtcattacatccattactggtactttaacatttgaaccaattttctcagttaattcttcaatattattattaggtatattaaaactaattttaatattatcattataagtttccttaatttgaggatttgcacctctaataagaataggtttaactaatcttgtatcttccaccaacttccttaatgattcatcatcaaattgtccatttgaattataatattgtttatattcattagtagtatcatcatcattaataagacaaattaattcatttaatggttcaattgatttaaaatttttaaaattgttaatttgtggatgaacattcaattcctgtaatgtacttgattcattaagagcagcataatcaattctacgactattcctcccactcctacgagtcatcattgtcatagtattaagtctttaaagaagcttaacctagtaaattgcgaaaaaatgttgaaatttccgagtggttggaaaaaattcaatttttcaaccatcaacatgattattttgatagaggtacttctttctgaacgacaagacagtaacaatgaatagatcatttcataccatatctagaacattacaagatacttcaaagatatcatctgttaaaagagcatttgaatctgcctaatagtattaaagaaattccacgtaaaactattgataatagatttataccagatttaacaaataagaaaagatataatccatttgatttttcaattgcatcacaaagatttcaatcaaaaatttttaatgttaaaaaatctaaaattatggaaaattcatcatttaattcatctgaaattaatccattagatttttatacattaccacatttattaagtaattatgttaatacttcaggtcaaattttacatagatcagttactggattaagtgctaaaaagcaaaaacaagtttcaaaggcaattagaagagctagaagttttggttttatgagttgtgttgcaaatgatgtttcaacattcccaaagagaggtgattccttgtaaatagtgtgtatataatataattgtacatagtttaaatacctttaaaattaacataaacatcagtacctttaccccaaatactttgaattttaataccaccattaaataatttacaataagttaaacttaatggtaatccatatcccatacctgcaattatatttaaatttggattaggtttaaaattattaatacctaaatcatttgatgcattaatttgaatatcttttgaagaatcaaatacagtatcctccgttgaattttcattattatttttaactgttgtaaatgaataattccataatttatcaattaccttggggtgaataccattaccattatcagaaaatttaaattgtaatgaattatttaatttattaattaaaattaatatattaattggtaaatcatttttatttgattcaattaaagctcttgaagaatttttaattaattcatttaaaacatattctaaatgatcttgaaaatatgggaaaataatttcatcttgaaattgaagtgttttctcagttatatttgaatttttaataattgattgatctttatttataataattgtttcaattttaaaattaatattttcataatattttaataatgtcataccattaacaaaattaatacttttatttaatgtttcaattacatttaatttagtatttaataaattaataccattatttgataaatttaaatgattatttaaaattaatctaagtaaaattctttcacttaaatgaatatttaaaaattcattaactttattaatatcatgagaaacttcccttataccattacttaaatcaattatattatctgaatgaatttctaatattttttcactaattttaacaaatttttcattatcttgtaaattatttattttaaaatttttaacattttcaatttcaactgatccaattaattttaaaatttctgaataactatttaaataatcatttaaaattttattaatataaggattcattatagatataaatcttaattcaaatattttctttaaccttttagataataatattaaaactgtttgtaaactatcatttgcattattaaataattgtgatttatcatttttaagtattttttcataattaggtacaggtgaaacagctaattttgaaattaattgcatatgatttaattgtgatgacttacttatcgttgattttagtatgttcattgtgatactagggagtgtgttgtagttaatggaagaagttcttttgataatgtcttatcgaatgataatcatttgattacgaaatgactcaatgaggaatattacataatcaatatttcattttaatacactactatactactactatgataatcattaagtcattaaattaagcaataaggtatagatataataaacaaattataatataatataaaatagggaagggaaatgcatgcattaagtatatcaattaatttattcaagtttactttcaaagacaggtaattgtaaagcattgaacacgaatataagaattttgtctatttgctaaaccagcgaaagcattataccaagcaatgaaagcgacaataacacctaaaataccaccagcttttttacaatttggaactttacctaaatcagcaattgccaaaagtaggaaagtaattgccaaaaggaaaaataatgaaaagaaagctaaagttgatttcattgtacacagtgttaacatgaaagtgaaaattgaccaacctaaaagatagaaacctacgaacattttgaaattccacaggatcatcataacttgcagcaatattaaaccaaggaattgaagattgctccgaaggacatccaaaatccaccatatgaagataaagctaaaccaccaaaagtattctctaatgaaatttcccacataccagctaataattgaatgaaaaccaccataaaaaattgctaaacctacaacaacagaatcatttgaagtacccattgcaccagcattaaccattgaaagtacaaaagttgttaaagcgaaagcagataaaccaagtggagcaggatttgcaaatttatgaattgaaggagcagctaaaccaggattaagattaccaccgaaagcttgcagtaaatcttctttagcaaattttttattacctaaataaacataattaccatcatttgaagttgtaacttttgaaattaaatgatcagaattataagatgaattattatcatagaggccaacaggtggattgttattactgttactatgttcaagatgttcatcttgagaaacttgtttttctatatcgttaaaattagacattgtgaattgtgaattgtgaatgatttgattggttgtgtttgtgttgataataatattagaagcaaaaaagggtttagtttagaatatttttaaaaaaaagagggtacttgtacccttttaaataagattcaaaatctctttttcaccattgatccttcttttatttccctaatggacccctctaatttaaaagttatttaattaaagataatacttcactataccccaccggaccccctattacttaattctctatattaataatatactacttcactagtggtaaagtttaaattttaaagagcggagtccttcacttactgagttattgccgaataccgaaaaacggggagtggtaagtatagtatagagtataggctattattatgtggggaaatcaccgcttacgtaacactagaaagatccgaatatccgtgaaattgtaacctcactaactccggctattctccaatcttcggtgttagtagtattagtagtatctattatctctattactgatctttctgataatgttaacaattgttgaaatatcaccaccatcttcttctccttcaatctcattcttaatatcttcataaatatccaactcctctaatgaatcttcaactgatattaatccatattcactacaacatattataccaattgcccaaatactcgtaattattctattagtacttatatcaatattcatgtctttattattattattatcattattatccttatcatttatatcaccctctatactactactaccttcatcatctgtaatatatcataattatcattagataataattatccctatcaccctcatcattatcaatattatccccaaattcattaaattcattattataatcatattcttcttcacttatttcaatccttggtgatttaatattcctatcatttaccttatcatcaatacctatacatctccttaaccttttaactattatacttaataaattcttaactccacctccattaattattgaatcaatcccactctcacaatttaatatatctttaatatttctgaaaatttcttcattattaaaatccctaattacacaaacacctcttgcattaccatatgataaaatattctccatttcatataatttatttaaattatcaatccatccttcaacattaatttcaacaattctttcaatatatctaccatatctttcatataaatacttcttacctgctttatccttaattatcttccaaattaatccattcttaccatcaattacatcaattctttgcttaattaatatttcaatcttaccaaatttcttaattccaattattgcaatcttacttatctcttcatcattatcataactttgtttaattaatgtactaattatccattcctccatctctaaattaatattaaatttcccatttattaaattatcatttaatatcttaattaatctcttacatataatcacctttatctctttattactataaacactcattttttcaattaatatccgtatcttataatctttatcaatttcaatctcattagcaattattttctgtaattcaatattacgttctttatccttaattatttcaaatattgaatcataatatccttcccttgataatatcttaatacctcgtttattactaccaatctttgataaaaatttaatatatgaccatgttaaacttttcttaatcctttcattactaaataatcctaatttaatatctccattgttaccattacttataccaccattaagactaatactatcatcatttctaattatattaattgtattattactattattcaaaaaattcacaccacttaaattattattattattattattaccaatcctaccccctcttctactaacttcatttaatgcaattactaaatatctcacaatttgactatcttgcaacatttcaataccttcatccccattattaactaatacttccattaatgaaatcccaacttcaatataaactttatttatattacttattaaatcaccatcattattagtactattattattattattattattactaatataaacaaatcctgccttatgtggtttataaaatgatattaatcttttcaaaaatttacttgtttgatgaacttcttcaaatcttttagtattctttaatatccctttaactaatataattataatatcccaattccattccttatattccttagttattaatacattactttgtataattaatggtttaatatcaatatcatttggtaatttctcaaaaaatttaattaaatcattacctttaagtaaatcattaattgataaattctcattattaattggtaatttaattatcttacttatattagataaagttgtactcttcataattaattctaaactaatatcctcatattgaatactcttaattttttcttcctctttcttcttcattaatgattctaatttattctttaatttaaaatgtctctttgtttctttctcaattaatttattcatatcattattaactttttcaatattaaatttaattatatcatccttatcaaatataatattctctaaatacataatttcactaattaataatgatatccatctagttgctcttttatcattttcataactatcaaataatttctctaaaataccaactaatccacattttaaacatgcctttaaaaatactttaataaattctttatttatatcatcttcatattctggacaacttctacctctcatcttattcttaatttcattaatatttaatttctcattatcattatcattattatcatcatcctcatcatcattttcattaattatcttaattccattggtatatttgaaaattatcctctcccaatcccataatacatttttctcttctttattaccaaacattgttaatttcttaattcttaatccattggcaataacactcataactaatgtcctaacataaacttgttcagaatataatccattaattaatgttctcaaattcttataattatcatctaaaaataatcctaatccggtccatgtacccattataatatttaatatattaattaaatgttccattcttaatttattatttaaattattgactaatggatcaattaatgatgataataataatggtaaaaaattacaatcaattaaaagtttcctcctatctggctcattaagtaagtatattatagttggcattattgaaattgataaatttttagttattttaatcatatcattgtttttattattctttatcttagcactatcaccactcttattttgtaattggtaactgtttaataaaaatggtggatcaattaagatttgtataatatatttaattataccacaatcataacttcaattgatggatctttaataattatctcacataaaaattcaataattgatatcccaataagtatattctcattaaatttaccatcttcaatactttcaacattaatcttattacttaacttaatcatctttcttaaaacaaatttatcgaaaaatattaatccttttaattcaattactttccttaaaaatttaatacacttcgattacatcaattccaatatcttgtattaaaatatcacaaataatagttattaatggtttccatttagatactttagattcattcattgtgggtatatgtaattgtcttaataatggttgaatattaacattatttattgatcgatttcttaaattttcaacttcaatatcatcactgttgttattatcatcaccaatcatactactagttctaacacctctcatatccatcattatcattgaaactaatattatttattgaagcttttaacaactgtatcaactttatatggactatcaacattagtaaaaattaaataattcatattcttgtgcatttataatatcattattattctcttctaaatctctatatttaatataaggatatttaaaatatctatcatgatgataaaatttaaaataaaaatagaaaatacttgcaatatcattaaaatttttacaaaaaattcttaataatctaaatccacaagctttaatagatttatgtttatttgaaaacattggccaaattaatggtattataatcatcatacttggcatctttaattcttcatgaaatttagttttctcttcattaatgacaatatcatatatttgattacttaattcaactataagttcatcaatttctgtatcattatcattattatcttgttgatgctgttgtttattatcatttttatcgtgtttatcttcattcactgtattttctgtataatgatcagatttccatatttctaatagtttattgatagtagtgtctaatcgatattgtcgattcaaaccgtcaccaccatccatatccaattgatctgtggagtaaagtctctctaaaaaaaggagaaagatctcatcaacatcagatctatcacaataatgatgcaatcatcaaagattcatgaaagttaaaaaaaagtcgttacgtaatctatttaaaacctatttaagtactttagaataattatattcaacttcatcaatcattttctgtaatccaattataacaaattgatgagttaaattagggaatttatcacgatgtaatccaaaccattctaatggtggtgttgcattacctaaatcctttaattgaggtgtatcaatttcaggttcattaattgcaatgtaattgtattttttatcactttcaacattcttaattttatcctctaaattaattgattcaattgttgattctttataattttcctctaattcttcatcatattcatcaaatgtataaaatcttaatgctgttaatctattacttaatgtaattgcatgtgaataccacatttctctaataaaataaactgatccaattttccatttaatgtcaactctaccatcaaatttacatttaaaattatatttaattatattttctccaagtttttgaattgttgtcatttgaacttttaatgatgggaaaacaaatatattatcagcaattgatttacttgtcatatcaatatattgttgaatattctctggatttaaaattgatttatcagttggtgtttccttaaaacttgaaagtgaaactttaatatccgctaaacttaatttaatatcatttttcataacatttaaattatgttgataaaatttaacattatgttcaccaattttaataactaatgcttgtggatctaataaactactaggaaaaatttgaatttcagttgatttaacattaatatgaataaatgtttctaatttctcaattaattttaagaaggtatcagatggaacattatttaaataatcttttaatgcaactttcctcttggatttatcagttttagtaaattaattcaatattggataatccagatgtttcaaacatattctcttcaaaatcatcaatattttcatcatctaaattactttcactttgtgcttcattaagaacttgtttatatgataatttaatatcttgtctaattcttaaaccaattgtataaatatcaacaaaatttgatgcagttaatgcagtcatgaaaactttaaaactttccatattaataccaaattttaaaatatcattctttttaagtttcctttgattataaatgacaatttcaaatttaataatttgtaaaatgaaaaatggatgataatctaatgaaattctagtttctaaattctggaaaccaactgatactaaaactaatggtatgtctaatgctctattattaaatttccatgaaattgcacttgtaattctaggtttgtttaatactaatgtaccactcagtctacccttagattctaaacaaattttattgaattcaaccttaatattattatcccaatttgatgattttgtagaaattgcaactaaatcattaatatcaatacttaattcacccaatgaactacctaaatcaattttacctgtcattcttctaataattaatgttaaaatgaatgcaaatgcagaagttgtagaaacttccttcaacattgatgcaaatgttttcttttgaacaactcttttgtttttcttaataataactaaattatttgaattattaggtaaccaaaaattcttaaataaatcaagatcttgtctttgttggatattaataaataaatcaacactatctaatgttgcaactgtagagaattttttctcaccttcaatcattgccattgtacctgtaattgaaaattgatttaaagaaatagaaccacttctaacctttgaataaacatgtttcaattcagattttataccacttaacgataacacagcagatacaaattgatgatcagttttaacaattaaattgatttcatcaataataacttcagcttcaatattagctcttggttcacatgttaatgttaatgattgtggttcaattttaagggtcatgttaatatcaattttatctgtgaacttgacaaaatcaatagcagatgtgtttctttcagtagttgtagtaatcaaagatttattttgtttcattttatctctagtacttgaattcctcatcatagttttggtactgtcaataatatcttgcaaaactggaacacacgcacatgacaatttgttatgtgtttctgaaatcaaaatactcaggaataatgaatgtttcttaaatgtattaatatcatgaacgtatctcatcgcagctgatataccaggtgattctaaacttaatactggaattaaaccgtcaacttccatattagaattaaaaataaagaatgaggctcctccaaatttaaaagcacatctcaaaatagtaacctttttgttactaaatggtgtgataggagatataggagacgtaatttttgtttttgaaactgtatgagtatctgataacttatgactaatttctggttccttactttttttctttctaatataatgttggacatgcgaatatctgtcttgaagtttatcaatagttttccatacatgttcagtaactctaaatatattcgtctggaatttaaaattaacagtttcaccatcaacttttgccctgatttgattacttttttcatcagaatcaactttgtaaatcagtgtaaaaactgggaaataaacacgattattgaatattttttcacttttcgttgaataaaatgtagatgagttaaaaccatgagccgttgataaatacataccagtacttataatcttaccagcatctttagcacaaagaatcgatgtcttctcaaacccaaaaataataccaggtgcaattgatgtgtatatttcatcattttcactaaataaccaaccaaaacaaacattattcgcaacaattgatatactgaaaaacgatagtattgtttctatcgtatcttctaagttagccgggttgtcttgaacaacatcttttttggctctaggttttagatggactgcaactgcaccatatgtttcaattacctcctctaatattattggattaacaactgcacggaaatgtgatgatgttatattaagtttttgtaatttatggctcggtaattcaggattgataatctcaacaatagtttgtaaatcaataattgtactaacaccatgtataccacttaatgtaataccaaatgtgattgatggaaaagaaaattttccaaaaggtgaatatctgtcgagtttcctgtcaaatgtttgaatttcaaattttggcttcagacaatcaaaatgaactttatttccattaatagctactacagaagtgatattgttgaaaccaacattcaaaaacaagtgaacctttttgaagatatcaattttttcagattcttcaagctctattttttgtggaatagttggatctaatttagattctacttttgaagatgcagttatctggtcaatacgcttttgcgccttttcaatcttttgaattaacaaatcccagttcttttgtgcagttgatatatcactttgtccctctataatcacatcaattaaatcattgtgtgtaaaatcaagtcttacaataccagctaaaaatgtgaacaaaacaacatgtgcattttctctatattggtcagtgatcataaatcttattttgtcaatattagttgagaagtattcaaaaatgtattttgagttttgggaaccaacaaaccatttagaatggctaacattatactcagtcaaacatccaaaattacccaatttcaatgatacactatgatcttgaatttcgaaattagcaaaaaatggtgataacaattcaatatgaaccaatatttttgatattttaagtgaaacagtaaagtcaaaatcaaatttttgaaatatattattctcaacattatttgatattttttcaaacgcagatgtttgctttgaaagttgcgagttgctatctgttaaatcttgaagcttatcttcttttttcaaacttttaataagttcaaaaacgggaacaatatcactctcaacagtttcatcaataatgttcagaacgtcctttgtatcaggcaaaatactcaagttgacaaaatcattggcaacaaataataacgtttttcctgttttaaaagaccctgtatttaccaaactagttgtatgattttcacaatgaatctcaaacaatggagtattagtaaccaaaaattcaatcgtaaaaaatgtatttttgaagtttaatgtacaagacataatttcggctgatttaataatggatgatgtcattttagttccttgtccataaaatgtaagaattgatttattgattccaaaagaatgtgaatattcctcaatcgtaaagttggtggtaattaataatggctctgcaggttcatatctttcaacctcattcaaggatgtagttgaatccatttcatcggcagagctttggtttataacttcattcaatttatccatagcagaattaatgttttctatcgtagatgagagctctttgaatatacataccaagttagtaaagtttgttacaatagatctgattttgacagttacatctaatcctctttgaattggttgatctaacaatggtaatgcaacatttttaacaatttcttctaaataatcttcattgaataaaacaaacagatccttcaacaggagaacatctttaaaaggttttactgaaaccgtcaaatttttcaaagcgaatttacatgtatgcagtaactttcttttggccttttcttcaatttcaaaaacagttctgaaaatgaaattatctttagttttatgattatcccaacatctccaattaccaaaaataacagcaacttcgtcctctgaattttttggagcttcccatatcctatctttatacatttgatttttcacttcaagccaattagttggcagattttgcataacatgcctcaatcttggaataatcatccaattaccatccattctaatatgattttgacagaaaccggcaatgtaagaaggtttagtgatacatggaggatcatgactaatattgtaatcaataccacctctagataaatcataaagtagttcacgcattgatttttgtttatcaacttgaaattgtttccaagaggttaaggctttattaatggatttttcaaattgtaaaccccaaagaattaaccatgctatatttgtagggtcaacaaaaaatgaaatattttcaaaatcaaatgtagttatatctttggtatcaatagacttttttagcaaaacattgtgaagagaggtagtaatcacgtctttttcgtcttttaaaacatcaagattcacttgattaaccagggtgtacagattgaatgcgatagattcatcagtgtgttgtttcgataatgaaataacagaatctcgaatctccaaaaagatataatcattggaatcaaatgagtcagatattttcagagtgaacaaagaaaattgtattttcatctttaacacatcgttctctttttgaaatttaaaaaatgtaagaaaatcgtcttgtaattgatctaaaatggaatgcatactaaaatcagtcatatctgaaataaaatcaacaattataggagcaattgcaggtgaaacaaaaatttcaaagttaccaaatttcattggaatagtattatatgaacatgaaggatctaatgattttaaaatctcaaaatcaccaaggtttgaactaaaactgaagaaatcatcataatcttcatcattataatcatcaaaattagatgcaacattttcaagtctctgctgaatgtgagctggcatactatcaataatcatgtcaacactttgacttgttacgggtaatggtggatctggataataaattgatgaaactatagatttataacctttgaaatattttctatctttagcaaattcaggaattaaaaatggagttctatgaaatggtgcatcatgctttttaagatgcatagcttgttgtttcatacgttcaaatgcatctttcttttgaatgaaatttttaactccgacagatgttattaatttcagaaccatatgatcaccattgtaaccttcaatacttattttatcaattaccagtgtaagtaatgcgttgtagaatgtggttggttgatcagttaatttgaagaatagttcattcaatccgagtttgaaagtatagttgtttcgtttaatgatgatattgagatcaggacatttaaaagagaggtttaatatatccatcacaggtatttctgggattgacaaagaattctccaaatcttcatgaccagccccgaatgacataccagcacgagttaatgcgtttaaaaatataggttctgcttcaatttcaatattgcttgtgttaaaatcccaacgacagtaataagttggttcggatggaggtaatccaaatattctaatactatgaatggataaatcagaaatagaaatttctgggacaaactgtacgttctttttggtattttcaaagatgatagattcatcacacgaatcaatatatcttccactgatttcggaaaagttagcttgtaaatccatataatagttattatttctcatatctatatccaaattatcaaaatgtaatgctaaatgtgatgtacaatcgtataaatgacaaggaaaaaccaaacacccattattaacttgaaaagaaaacatcaaatcagtttcatttttcaatcttttaccttcattgaaaggttcagattctccatacatttccttaccaaatgaatctctaaactctaacaagttttgaaaatgtgtatgatcaccaaaataattatcctttaatgacatgaaatatttgattgcaaaaccgtacactttaacagtagtatcactacacgaacaattcataatgatagtatcgcaagaatcaatttccataaaactgtaaattgtatatgatccttctaatttaaagtcagttgcactaccaatttgttcatctttcatgaaatttgaaaaagtactcgatgctggatgttcaacagccaaatcaaatcctgtagtttctaataagtattcaacagtatttgattttttatatacagttgtcattggaactttgatatctacaaacatgtatgaacctgtaaaagttaagtatgtattaacacttgggtctaatggattattgataatgtttttctcattgatgttgaggtatattgcatattcataaaatttccaattaaagttgtaaataaaaggacggaaaagttcatagggagttggatcaccggatccaaaatcagtcaataagtctgatatcaaagtaatgtgttctctaagtaagtataattcagcatttttagaaatgttttcaaatttccagttgactaaactattccattccaaaggaaaaggaatgctaccattcaaaatatgctcatcagcttgaaacaacacatcatgattaacactagttgaaatttcaggtttaataaatacagcattcagtttattatcagtacctctttcaagtgttggaatcattgatatataaaaatctataattgaaccttttgacattttcaaattaaaccaaccaaaatgtcttaatttatggatatcatttttcaaataaagataatccttactttcttccctatgcggtattctgaaaatcaattcatcaccacattcaaaagataaatcaaaactgacatattgccttctcattccagattctaattttggaaaaggtacagtatctctataaagagatggaaataaaagttgatgtaagaaacctctatttttttcggcccatggaccgtaacaaatagttgcaccatacacaacaatatccagaccaagcataggaggagtatctttattaccaatatcaatgtgatcaacaaaatctgataatttttgctttgaaggtactaaacctggaatatcatagtagtaattaatgtgacatgttgagcaatcaactatattcgaccattttgcatattctgtgttgttattgttgttgttgtttttactatgattattagtatcatgataattgtggttatcacttttgtggttgagcatcgagtcagccgtgctatccgaatcactggatgagtgtgtcgttaaatatctttccaaacctttccattcagtttcagagtgagagttatcattaaagtatgaatattcatcataactattaaaatcttcatcatgttgattatgtgtgttattatattgggaactatcaaaatagttacttaactttaccaaactatgtttaagacccgacaccatcctgaaaaatctctttgatttcttttggttacttaatctattgattttcctttccatagtttctatatttttgaaagatacattaggtttcatatcaattttgagatcagatacagtgaaatcataatgcgtacgataatgatctaatgaggatcctggtaacgcagcatctatacgaccagacattgaagaatatgatgcaacacataaacaaggagttgtttcattacctaaaagaaaagaacctttagatattttaatttcaaatggtagaaagtctaaaaatctagaatccatagtttctgaaactaaagttgatgcaacactttgaagatcatcggaattatttgattcaaaatcactaaactctgtattttttccttcaaatttaataggtatatgggtattatttgaagaatctgaaggagatgaatgtctttgagtagctgaagatgtattcgatgataatgaagatgtgtttgattgaaatggggtatctgatgtattttttgaatttttcatatttgttttaatattcatctcatttttaagtatagcttcaatattatcatatgaacttgatttattataaacgaacatttccaatccgacaatatcaagagaaaatcttgaaggtaactttttattagcttcttcatttagttttttcccctgtataaagaattgtgattttcttacaaattgtaaccaatatttccaagtgaatacagctgtatgaataagtataagttcatttggtgttacaatcataacatttttaagaaatatacgacctgctaataaatttattttaattgattgtattgaaattttcttatgatgtcgccgccatagaatattagtgacaaaccatgtcactaaattacctattattctattgaaatagaagataaacataattgaggcaaataaaacaataagccaatccaccagaaagacccaattcaagtagatggtggaagtgactgatctagacacaaatgaggatgtaacatccatcttgtgagtatattcttgattgttttataagttacttgtaataatccaacatttaaaagaattctagcttattaaattgctatatacattaaaagcctaaatttaaatattttcatgttaactaagtgagcattaaatttgccacttgaaatttccgaaatttgcgagaattttggatgggtggcaaaagagatcgtttggagagtttcaaaacttgttgattcgattctgaataggttttgctactttggagggtatatacagagaacatgtctaacgatccatttaagaagccagaaaaggattttactgaaacattgaacgaacagtttgttcaaattgatgctctcagtaaagctgaatataagacaggattagataaattattacttttggagaagcaaacaagacaagcatctgatgttgcatcttccaagagagttttagtaaagatcattgatgttcttgttaatgccgatgattggccattattagaggaacaaattgtacaattaagtaagaaacacggacaattaaaggattcaattcaatcaatgatgaaggaagtaattgaaaatttagataaaattaaggacattgatcttaaaattaaagtaattgaaacaattagagttgtttgtgaaaataaaatctttgttgaaatcgaaagagcacaagttactaaaatattaagtgatattttattaaatgaaaagaatgatttagataaagcatgtgaggtattatctgaattacaagttgaaacttatgcttcaatggaattagaagataagattaaatatatacttgaacaaatgaaattaaataatatgagaggtgattatcaattttccaaaatattgtcaagaaaaattttaattagatcattagagaaattttgggaattaaagttaagatattatgaattaataattgaaattgccaaatttgagaataattatgaagatattgttaaatataatatgagtatatacaatattcctgctattcaaggtgatcttgatggaaatcttaaatatttaaaggaaattagtaattacttaattttaacaccatattctaatttacaaaatgatttaatttcaagggttttaattaataagaatttaagtaaattaccgaaagaatatgaactaattcatttatttactaatgaagaaattataagttggaaagaattcaaaactgaaggtttgaataaggatatatttaatgaagacacagaaaagggtaaattacatttagaagatttaaagaagagagttattgaatttaatttaagaatgatatcgaaatattattcaagtgttaaattagatagattatgtgaattagttgaattaacacaacaagaaactgaagattacataattgaattagtgaatagaggagaaattcattcaaagattgatagacctagaaaaattgttaaatttatcaagactaagagtgaaaatgaactattaaatgaatggagtcaaaacattgaagagttattagaaaatattgaagctgttcaacatttaattaccaaggaagaaatgatggctaaatagaatagtttaagtatgtattacattttatataatacatttccaacgatcatttattcagtattccctctaaaatggattcgtaatttttcattttattatagtaaagagtatttaattgaattaataaatcatttatttcctgttgtttaacatccggtttaaactttaacaattgtaattgatgttcaactttagttatttgagcatcttgtttaatgacgaatttgtcatcttgtttctgtacattcaattgatcaagtaattcagatttaactggatcaggaactgtgttattagatatacttaaattctccaagtaaactatcttattattaatttgattctttaataaatgtaatgattccataacattaaaatcatcattaatatccggttgttgattagttattataatatttaattctgctaatgataatttatgaaattcaatagatgattgtatttgattgttaagtaatgctctatgagctttattctcaaattcataaaccttgtaatatatgttagtatttgttacagtaattgaaaagaagacaatgatacatactcttactagttcttgttgcatttattgattcatttacaacgatttgatatgacgattggctgataccatcagaataataattttgatttccgggcctgatttcctgcttttgaaaattgaatgttcctcacactatacaaaattaatgtggaggttagctgttatttttaggaaagatgcattattttttcggtatacatttgattgattgtcttgtgaagtaatacgaatatggagtcaattgaactctgtattgaggacgtgaatgttgagaagttctgggaagttgcagatgatttgttgtataccaaaatgtattacgatcgtgatactaaattatattttaccaaacgacgagataataatgataaaaatgataatgatgatgatataaatgaggaagaaatgaatactttactagttagttatattgcattgattgttaaatattatgatggtgttgcacatttatatgatactgaacaaatatttttagagaaagtttcaggatttttacttgcatttccaggatttatcagtaattatgatttctgtgtacgtaaattggcatcattaatatgctatgcagctaaaaatacaactactattcctacacaatctaatgaaactctattgattgtaaaggttgttggttggatcttacatagtggcggtgaaggtaccattgaagtaataatgaaatgtggcggtgttgaagctatatccaaatcaatttcattatttaataataataccaaaagtgtcttcaatggtataatacgtgttattattgatattttcaagaaagatttaaaacagggatatgttattgcatcattttttgcaccatcgacagtacaaaatatagctgattcacttagagtaagatcaagagctgaagatgaaagtaattatatttgctttatactaacattgttacttttttattataatgacgaagttgttaatataatattacattcacctaagagaacagctgttttcacagaattattagtactggtatttaatagagatgatgatcaacttttacagagacatgttgcaattgcattatcacgtactgcatcacgtttatataccaatgattgtaaagttgttgttgatatattattaagaaaattacaggaaggtgcagattcatccatagataatgatgcattaattatttcatatgtttcacttttacatcatttacttattgaaagtgaattatctaatcatcgatataaatcacaggaaattgcacatgttttatcagttttaatcaattgtgaacattcatcattagatattaaaatacaggcaagggaattattacaaaatcataatacaattgtatcacaaccatctacaccccctcatcggaattcattgcataatccttattcggcatcattacctgatttaaccaatgtaagagtaccttctcaatctcaatcacagatattgcaaccaccacgtccaccacctccacgtagaaaagctctctctcatagacatacctaactaagtatagctaaatctatgtaataaaatgtgaaaacccttatcaacaggaaatacatttccgaattactactagactgactcagaataaagggtactaaaaccccccggaaattacccttttaggcaattgacgatcctttaccgcccaattttccagttttttcaaattttcctcatttttttcttccatttcttcataatcggtgacacattattactgttaaatttaatactattattgctgattgataaatataccactcttctttcattcttcgtcttctttacccgttttgaacatttccacttccatttaagcgttattttagtctttatcttaaaacgctttttttccattactcaaagcttattgattaatttatttgaccgctgtattatttttgcacaatacacatataccttctgctaatttaatgttgaaattatcttcacctctattatcctcttcaatctcatcttcaaaatttaaattcttgaagttttcaattcatcattcatcacgtatgttatcatcagtaccattagaatctaccccttcatcattaaaggaaatcgcttcagcaaatttcactcctgctcctcaattaaaggatgatcaattaaatcctcatgctttagttgctaaatatgctgttcgtggtagaattccaactatggctgaagatttaaagaaaaaattgaaaaatgatccatcatctgtaccatttaaaaagattatctctgccaacattggtaatcctcaacaattagatcaaaagccaattacttattatcgtcaagttctttctcttattgaataccctgatatgctggatcatcctgaaatttctaaaattttcccacacgattcaatcgatagagctaaggaaattttagcaaatttatcatccgttggtgcttattctcattcaaagggtgttccatattttagagaaactgttgctcattatattaaagatagagatggtcatccttcaaatccggatgatatttatcttacagctggtgcttcttcagctgttaactatcttttaagtttattatcaactggtaaggaaactggtttccttatcccaattcctcaatatcctttatatactgcagctcttgctcttaataatgcttcagtattaccttattatcttgaagaatcagataattggtcagtttctgctgaacaaatggaaaaagttataactgatgcaatggataaaaatattaaacctcgttgtattgtcttaattaatccaggtaatccaactggtgctgtcttaactgaagattcaattgctaaaattattaatcttgcttcaaaatatggtctggtaatcattgctgatgaagtttatcaagaaaatgtttatcaaggtagatttgtttcagttaaaaaagttttaagagatttacaagcggttgataatgttaaatatgctaatgttcaattagcttccctccattcaacttctaaaggtatgattggtgaatgtggtcaaagaggtggttatatggaattaattggtttccatgattcagttgttcaacaaatcttgaaattagcttcaatctctctttgtcctccagttattggtcaagctttagtttcattgatggttaacccacctcatgaaacccatccttctcatgatcatttccattacgaaaagaataatatttataatgcattaatggaaagatctcatcaattatttacagcttttaataaaatggaaggtgtatcttgtcaagaacctcaaggtgcaatgtattgtttcccaagtttatcattaagtgaaaaggctaaagctgcagctgttgatgcaggtatggaaccagatgagttctattgtgctaaattattagaaaatactggtatttgtactgttccaggttcaggttttggtcaagttccaggtacttggcatttgagaacaactttcttagctcctggtactgaatggattgatgattggtctaaattccatcaaaaattcatggatgaatacagagactaagtaaagttttataaactcaaaaactatttatttactttatataatcatataattatctatacattcttcttactttgtttaattaaatcaccagtataaacaggtaaaatactaactaaaagcatacaaacccataatggaatccatataaaactaacatataaccatgtccaacattgtacacgtgtataacttttcaataaaccagtaaaaatatcaacaggtccttcaagtaattcatttaatgaagtttcatctaaaaagtcaagaactttctgaatttcacgctctaataatggcattgtaaaatattgtattaaatttcttagactatctaaatgagcattaaatttatgaagtaatccaaaaatcattaaccatgttgcaggacatgtaagtaataatactaaacaatttttgaaacgtaatttaaaattactctttgttgaataacgaattgaaaaaattgcagagaagcaaacaccgataacatatgaaagtgaaaaatttaaaatcatcataccaaataatgcatatcccatgaaaaacatacaaatcattgttaatgatctcgaaaaatcagaatgaattctaatactaagaatatttaataatggattaataatgaaagtaccaatgaaaatcagtgccattgatggaataacaaaataattatatgttaaattttgataatcaaactgaatcctctcccttgtaacaatattggaagtgtataacccatatgttataaaggttgatgttattatcaaaaaggtaataattgaacaaatcattggaacaaacttaaatgtgagtttcttcttaaccacttcaatattgaaatctttataactattaccagctgatgcatcaaatccatcaactaaagaatttaatgatgcaagaatataagcaattgaaatcattgctccatatggcaaatacataccaacagaaacaaaattctttgcacctagtaataaataaaagaaaaaactttgatgaaatttttctaataaattattaacacttcttaaagtactttcaataactctaccaaatgaagttatatcactattatgaccttcaactccacgtaatttgatagcttgaacattccatccactaaaacttttattatcaccgtattcgagaataccagaacttgcaattgaaaataatccactaaataatgatgtaaccctactataaaaatcgtttgtccataattgtccaaatggtgtattattaacactaactctaataccttcattttcagcaatatgaattgctgtattgattagatctaaattaggcaattgtccattaatacctgcatattctaaatcaatataaccaatataatcacccgatgacggacaatcaacaacaattgcacattctaaactaccagcagtattttctaatgttgtatgatatgcgttaacccaatatcttaatgattgctcaccatcctctgggaacactaatatcacatttttagcccaaatagataatcttcttaaatatcttgctaatcctattgataatgataaaccaccaacatttaatttactttcaccttcaaattcactataccaaggagttgctaataccattgcttcagtatcatcaccctttggtgcatgataaattgcataaagaatactttttctcagtgcctgtctcttcatccataaattgaacaagatttgttttataccccatttcaattaataatttatttaaattatcattttttgttgtgatattatcattcatcatattaacaatttcatttctataaccacgtacaaaattccattcactttcacggaaatatgaatgcgcttgacctggcattaatgcattctcactgaaatatgtatgtctatattcgcctgtcattgataattcaatcatcataattattgatattattggaataaagaaacataaccatggtaatgcacgaatgattttctgtaatgcattctgatcacgtagtttccgttgaacaatttctagtaatgccattgtctggttattataattgttgtaatgttaagaataaaaggaagatctggaaaagtgttgattataaattttatatctggctgtgacgtttactaaacacgtctcattttcatgaatttttaaaatcttactataacacgttgtatcattatttttctaatgcttggtgattacactaaacgtattttaagatgtatgtattgtttaacattgagtacttataactgaatgagttgtacagcttaaaggcaagtgcatgttaataaaattacgtaatatgctaactagtcgtttgagatgcagatttattaaattatatacatagaagttatgttctataaatcgataaacattggaaagtaaatggatagaaaaaaaagagtctaagcattagtactgtcttcttgggtacttggttcgttatcattagtggtagtgtgactagtgttatcattattattattattggtatcatttgtattatttgtttcagtatcattattattattattggtatcatttgtattatttgtttcagtatcattattattattaccacttgaacttccagaacttgggaatccatccattgaatcaccatgaatttctctagtgactacaccattgggtgtacgacgactttcaactccaagaggtgggaaaatacctccaaatgttggttgcccacgtgtaacttgtctaacaacgggaatcatactaagctggttagctattggactttcagttctaattgatcctgttgaagtatttgtggtagtagtaccatcagcaggtggagctgcaatagcaacagatgcaggacgtgttctatcagatattgaagatacaacatctctaataaaactaatcaatgaatcacgtaatgctgatgatggagtatttgcttcattgttggaattcacagtgcctggagtatttgtttgacctcttgttggatttctgttagttctgtcaaagatattattaccattaggtgaaaataaaagttcagcaggatttctagcttcatttccagtagaatctgtactttcattattttgttcaaaatcttcctcctcattttcattagtagtaaaagttatttgtctattattgaaattctctataaatggtctgcagttactaatgacttgcgctaaattaggtaacgtaattgaaatgcatctagattgttcatgattaagttccattattgatggtaatttttctctacataatggacatgtattattggttttgaaccattcacctaaacatgaagctccaaaaatgtgaccacaatccagtttaactggataatgtgataattcctttttattaattttttcagttttctttgtttcgggtttctctactgttattttatcaccatcgttattctttatacgttttgcagatgacaaatcacttgattcaagattatcattgttatcattatttgataatcttcttttatttttattgtaattttccttttcaacatacttatcgtaacaaattggacagtcttgttcattttcttttaaatcttctaatttgacaacttgtaatttttcaaatgtcaattttgaaacacctgacgatttctttaaagtaacagcaatagttcgaagtgcaatctccgttgccaatcttaccaaaacactaacattctcctcatttgtttcatctatacttggaacatataataataatgaaccgacattactttcatttgaatttcccccataaacataatttacagtaaggataatatttcgtgattcagtattaataagtgaaggacttgttggattttctgagttattattagcttcaatattatttccagtactatttgggcttgtattattattattattattattattattattattattattattattattattattgtttgaaagttgattaatttcattaacaggggatattggtgcaattcttggaggtgattgacgatatagacgatccagtactctctgtaaaggcgctaataatctagatgttggttgtgaaggatcattatataaaccatcatttgagacatcgaaggcagggtaatctaaacctcgcacaccactgttattagaaatagtattatgttgagggattgctagttcagtagatgcattggtggaagtagatggttggtgcagtgatagtctcaactgctgtgttattattattgttgttactagtatcagtaatatctgtagtgaaattagatccattatcgttattattgttattattagtagtagtacccatatttccattatcaattgtaggagttctttctctactacttgcatccgccatagttctgaaaagttctgaaacagttctcgtagatgcattagatatatcagccaaaggtgcagtaacagggaccaacttcaatggtcaaagtgtgactatttctacctctttgttgaacaataacaggtggtaatatgtagttcccattttcatttcttgtgataccatgactcttcaaaagaaccgggagggttattctgagatatatttagtagtggtggttgtgtttgtgaagacatgtcgtccaatagtgtaaaaataaagagtataactaagtaaaagagagaaaagaggatcagtagcagtgattaataatctataataatacccagtcgaatggacatcactcgtcacaattgatagtgagggattctttttctgggaatttgaaataaatctcgtattctcacagtattaaatttacgggttttctatttacatttcttttcttttggatctgtagtgtcttttttggtagagagtaattgattaacagtgtctcaatactgggttattctgaatagtgatatatcactattgattaagttgtaagttgaaaagaaagtattgaaaaaaatgggatcacacagtgatgattttgtgttaacggatgagttattgacactatccgaacttttctctgatgttccactatttcatatccaacatcttcttgagacatcaaataatgatatagatagtgttgcagaacaattgttttcctatcatttgattaaggatgatttggataaaatttgtagtgaaaaagagaattttgtagagaaggcagttcctgagaaaccgaaagaatgggttttagttgaacctcaggagaaaactaaagagaaaccactgggtaaaagcaaaagaaaagaaaaacgaagtagaagaggtagcaggaataagaaggataaagaaatatccaaaaacgaaggagaaagtagcattaaatgttacaagcaagtttccatcttctgataatactaataagaggaagaatactgacattcctaaatcttcacgaaaacattcttttggtgaaagtataaacatgcagccgtctgacgagaatatgagtaactccaacagttcatgttttgataataatagtgatactactagctctatggggagttcgaacagtacatatgatgaagaaatggaaaaacttagtaatcaactaaaggcatcaagtattgatgaattactggaaaatatgaagattgaacaattatcaatgaaatttgaattacgagatacaataaaggatctattaaatgtggataataatgaactggttgaatattatctcgatagaaataattgtgataaacttaacacaatttatgatataatgcttaactatgatgattcagtacctaaatcagataatactaatcataaaattgaagaaattaactttcaatggggagttcatagaggtggtaattcaatgtctgaagtgcttaaaaagaagatgaaaaatataacaatttccgattctgatgcttgttggtttgaattacagacattgattgatgctaatccacaacttgaattacccaattcattttatctgttagctatcaattggtttgataaagatattgataaggtgttgaacttggctattgttcttaatgattgttttgatataaaggaaaagaagaaacaacatatgatgagacaacgagaaagagagaaagaattaaagaaactgaatttacaatttcttcaaggtaaagaaatggatttcacagttgatgaattgaaaaaattatcagagctcgataaggaacattttgatctttatttatctgagaataacgaaaattctaaacattttgataaaaatggattttattatgtggataataaaaagggtaatcaaaataatgatgaatatatgcaaaacttaagaataatgcaatggagagtaaataatagtgaaaaagttcgtaatattactaatgataaaagattaaaggcatattattcaactaatattggtagaataaagggaagatatttattcactacatcataaggcacagagaagtgaaattgatattaaaattgaaattgcaaaatcacagtttcgtattgatttccatgatacatcagttcaaaatgctgtttatgcactgagagaagtattagagtattggtggaatgttgaaatggaaactagaaatatccataatacgagatttgaatttactaagatagtgcatgttgaaccattcaagattattacaggtagaggtttacatagtggaggtggtattgccaagattaaaaatgccactattaaatttcttacagagaataaatacaagtatgaagataaaacagctgcaattcttgttgttggtaagggtaagtaaaagtaagaataacagtatttatatctagataagaattatttttaattttttaggagtttctattatattttgtttatcattaaactaaatttatgtacatggatgtatatatacacagcggagatctatgaggatttaattgaaaggacaaattacctatttcttcttctttgatttttgtgcaatattaccacctaatttaacttcttcataattagatgttaataagtctaagaaatcatcttcttcagtatcaaccttcttagttgggataccagtcttgagtctttcaagtctttcagcttctgccttcttagtttcttgttcaacttcatcagcagatttaccagattgttcaaaggcagagaacttagtcttgaatttattcatcttacccttagattctgcatctaataaacttgcatcaggtttggaagcattccaaattggattatttctttgatcagtaatcattcttaattcatcctttggatattgagatcttcttgtaataactgaaccatcacttagttcaacttgggtattgaatttatagtaaattgctggtctagccttaccaactctgattttctttaatggtctctttggaagggctgcttgaatctgcacacgtccagcataacctcttatctgcacaaagttgaacattgtattgtctaatatactaaattacaaagattatatcttcttcctctatacacttgcaagtttgatgtagtgaaaaataatgaaatttgggaaatattggaaaatctttaaagttccgggtaaatgctgcgccgtagtggtttttcaattttgatattactgctgcgccattttgaaggccacgataattgatgtttaaggggaaggtttggatagatagagttatcagattggataagtgcttctttttactggaaacagctgaaattgtgccaatgggatcaattctgtcgtatttgattgcttatattattggtggtgtaacatttgttcccttagtggtatattttatatggagattatcaccaattgtacctgatgatgtaaatgaaagaatacaccttgataatgttgcaaataaggaaataagtaagaaaaagggtgaacccgctggttatagggatttaagagctgggcaaatcattgataatagtgatttaggacttaaaacttttacttccggttggttaactgttacaaaggaattttataagttcccacagataaatccggatgattttaaatcaagtacttcaaatagtgatgtttctagtagtggtgctggaaatgacacaaagtctgaatcaaacacaaatagtacaaatgattatactggagattccgttagtcatagtaatacctctggtaacatattctcaaaattcataaaaggttctaatgcaaataatgctaatacatcagaaggtgaactcaaggactcagatgctgaatcagatgttggtgctactaaattgaaacaattaagacgtaaatacagattttatggtgtcatcaaacatgggaatttgttcctttacactgatgaaactcaaaaaaatgttaaacatgcaattgttttagatcactacatggttgcattatggcctagaaatttaactgatggtcaacttttcactaaaagaagtgctatttgtttacttaaaaaggatgcgtttattgaatctgaagagaaaatggatgatttgctcaattttttacgaaatgaaaaaagctcaatcaaggaactacctaaaagttcttattttttatatggtgatacatcccttgaaaaggaaaattggtattattcactattacgagcaacatcgttaccgtccgataacccccatgttaataaaattaatcctttaataaatgcaaaaccattatattatcatacagcaaacatgcttgatttgattgagactttgaattcaactgagaatcaattaacaacacaatggatcaacgcgttacttggtagattattcttggctacatatcaaacagatgaatttaagacagcgtttagaaatagaattgaagataaattgaggaaaattagaacacctggatttcttgaccaattacagattcatcgtattgatgttggtaattctgccccatttttaaccaacccaaaacttaaatcactatctccaaatggtgatttagaaatcactgttaatatgttatacaaagggaaggctatggttgaaattgcaacaaaattatttatcaatatcggtgtagggtttaaacaacgtcaatttgatattgtcatgaaagttattttgaataaaattgaaggtgaattattaatcaaactcaagcctcagccttcaagtcgtatttggtacacatataccaaaatgccagatattgatttaaccatcgaaccagttttcagttcaagaaatattagttatggtattgttacaagtctgttggagagtagattcaaggatgcgattaaaacatcattagtttatccattctttgacgattttgttttctataaatctccaagtgaacttttccgtggtggtattttcgataaatcagtaagaaaaactactactgaaaatccgattttcaattccgaagctgaaataaagacgaaggagaataaagaggaccctgagaacgaaatcacggttaatctgaaagacaatacttctttaaatcaagaaattataaaagattcgaatgactctgtattctccaaagcatcaactgccattagtgttgaaagggaaggagaacatactctatcaagattgaatacaatcaagagcgataattctggatctattgagataaaaacttcaacagacactgtttcagaacaacagactaacgcagacataaagcatacgatgatgaaatcatatagtaaattgaaaacatggtataaaaagaatcctcaaagtaatttatcaacaccaattaataccacatttgaatcatcatctttgaaaagaggtgagtccaatggaagtacattctaacaaagagctaccatataccccgcctgaaatgatttctaatagaaggagaaaaacatcaagagctgaaaatcctaatgctttaccagaagcaaaaccagaattggatatacctgcagctgcattatttcaaacatcaaattctgcttcaacaccatctaactcttctttccaactagtctcatctaatattaagaccagaccatctgctgaagcacttgctagttttgaaagaaagcgtggaggctcaaaatcttcacagtttagttccatttcgtcactagatgataaaccaccacttttccagcataatatacctaattctccctcatctcctgatcaattcattaatgaaaaattcaaaagtcaatcaacatctaatcctggttctggattatttgataatcatcaaaatctgaacaataatatcattgcaccaaagattttcagatttgactcacatgatcatatttttaatgataatgttgcagatacacctaaattacaagatgcaccagttttatctcataatatcaatgatttaccaaaagataataacttagataatgtaattgattatcaaaagacaagactcaaccgtaagccgccaccattgcctcttccaaaagatgatgtcgatgaagatataaatacgtttgatggttagttaatctttttgtagtaaaaatttttataatctaaataaagtttttatggttttatataagttataaaaagttttattttaatctaagtttgatttttggaccttttttctcctttgattctgatgaatctgctgaattatcaggagatggtgaattggttcttgatctagatctaccaaaatgagaagatgttggtgaaactgatgatgatgatgattttttaatggcattcagacttccaacaatgcttttagtttcctcaccccaattgatagcttttggaataggtttttttggttcaggttcagaatcaggtttgtcagctgaggtcgttgatttagataacggtgtttgttttgtttctttcgttgactctttagttgtctccttaattagtgcaacttcttttgttctattttcaggagttacagtattgctaacaactttggtaacaactgcttcatctgtttttccactggttttttcatcacctttatcatctggaactttttcatttacactgctatcattagcctgcatcttctttttccttatttacaggttctgattgagttggtggtgttggtatcatcattggcattgtttcaaatgactcaagttcttcttcttgttttataacagttttagtaacaattgtagatgttgcgatatcagttgtattttcagttttgatagggaattcttgttcggtaaatttagctaattttgctggggctattttaagagtaacaaaacgtgatttagatgagtaagttttctcaaatttgtcattcgttgacacaaaaacattttttgtattaaaattgaatttaacgtaacgtaaaggtgatgaaacatcgtgtcttatgatattatcatgtttaatgttagatataggtaattttatcttaacttcaaatttggaatgcagtctttttgatactaacattgtcattaacaacatgcttgctttgttattggaacagatttgatgaaagaatcggttccagcaggtaatgatttttgttggttggacttcggatctgttgttaacagtttcttactagcagttttagtcttgaacagtggtaattgaattttaaatctagcttcccttctaagcgaaacaactagtgatgattttaatggatcatcatcatcaatgtgtttatccttcaatttacaaacaatcttcttatcattgtataatcttgttgttacgataaatgagttttcaggtttgtataaaatcatcattatatccaaaatatttctccttgtatttattggaataagacaagagtttaatgaatcccatagttcaacctgtaaaccttcaccaaatccataagttttcctcaaaagctcgattgaacctttcatagattttcttgcgagttcatctactcttgaacgcattgttgctttagcagcactgatatcatcaatttgaattgcacctcctcttttgtttttaattccgtcttcatcttcaatatcttctaaaaattcttcatcatccataattgatccaattcccacatctgcagcaacaccaattgatttcacaagtattttgattagttcatacttaataatatgggattcatccagcttcaaagtagtaaaaaaataattcaaaatatgtttgtttttcaatcctcctaaaattaataatccttcaaatgcaaccaatctaatattcacttcattgttaggtgttgtatacttgagtaaatctaaaaatgacatagtagctaacccctcttggacaaacctaattttttgttgtaaaattacttttgtaacagtacgctggtatgatggtgaccactcatccattttcacacaacgattcaattctttaatggcttctaaaacaaatattgcattactatccatatttctattaagattcgtattttctttatcatgggatgcttctaaatcatgtatgattttattagatacaacaatcaaatcacataatgcaacaataaatgaacaatagaaatctgtatcatcaaatttatttgagctattatccagatatttaaaaatatgcaacataattcgtttcaattcaataggagtatctccatttttgtttctcacactagctaatgatacaagtatagcttctgaaacaaataaatttgagaaatcagtaaaatcatttggtaatggaaggtattcattaggatcaagttcgttataaccggcaactattttatgatcataacaaaacatatacttaaaagatttcaataagaaacgcattcctatatgatcattctcttcacttgacatatgtgctaatgcctttgcagcttcaactcttattccaaaaaaatacttcttatcgatcaatgttctcaacataactttagcatgataaagagtaggtttatttactgctgcaaaatgacgaatactttgaatttgagcttcaatatctttatctcttttcaattgtgattcaaatgtttcatctgttaaattgatagtatatttacaaatccattcattatctgaatcaaatcttagccattcaaatgcttgatctttttcctcatcagcagtttccacttctttattttcattttcattatttgatgtatgtacttcttccttcaactcccaatttttgatctcctctgaagtcattaatacattacccattataaatggtttctcttccactttttctttcttcttatttttttctttttctttttcatcggcctcttcttcgacttcatcaggtttatcttttctctttcttctatatttggtattatactgtatatctaattttgttaagacatcagaaattgacataatatgttcatatggtgcaccatgagcttcatgaattctaactgtaacaggaccaacaaatgctgcctgtggtttaaattgatcatcttctattataaaacagtttgcttgctccacaaaatcttcatgttgataatgtttgagaaatatagtattagtagaatagtaatcatcggcttcacctttcaatgaagatgtttgcatttgacgaattgacatttcaatgaataatctcttcttgttaaatttttgcatgattctaaaatttggtactccggcattaaaaacccaattttgaaaaaatatctcaagtttatgatgagcaactttttcacaaactctttgaaaatggaaagttgataaattattaccatttattaaatcatttgacattgcttgaaggaatattttaggtatcactcttgaaagaccaaaaagtttatctgttttcgtaattctcttatctaaaataattaatattaatggtgctttaagccttataaaattcaaatcttgatcagaatttatagggaatctaaataattgattagccagaggacgtttatttatatctagttcacataatagttggcatctttcttgaaccaaaaatttataataattcattccaaacattttccttaaaaattgtaaacccatgtatgatgaaataccaatagtacaccatatagtcgttcaaagtcttaggtaagacattaacaccagaatattgttctgccaatgctattgataatttctctgttgtactaaacattggttcaattcgtttaggcccatatagaagattggaactagctatagtcataccagcaaaggaacatgtattagaaggtaatgtatcaataaactaacaatgtataacttgtgaatggaaatgaactaaactctttggaataaaattcaagagctttgtataaaaaaagggtagtatttattacttcttcctttcttcctggatgataatatatcaaagttggaactttattaggtatttgcggtatcaataccaaattgtgcactattctcattatcatgattttcttgaatattttgatcgttgattgaaagttcatctgatccggatttcagatcaatcattggcattttttcaaaataaccaacggcaaatcctaaatgatgtgcacagacaggattataaaattgaaaattaacatactttttagcaacatcaagaggatgtggggattctctagaactgacaaaatctgggacaacaacgactgtatcaactgcttcttcagcttcttcttcattttcatcatcttgttgcatatttccatgaacatctagccttttatcctggtcattaattacattattttgattagatagtttctgtaatgcacgttctgcttcctttgtaccaatcattaaagattttccaatatctgctaatgttttaggaacaactatattaatatcccaagcaggtttttcatagaagttatcaatacaagggacccatgaactggtggaacaaccgaaatcatcattcaaagtataacaataccattcattccttggtatatttgtagatttcccaccatggaattgtattccatttttggagtttttgaccttgtatataatcttaatattaagtggagtataaactttatctgagttgttcatcgtatttggagtaccatttaaggaacgactagttcctgctggagaaaatgacagttttgaagagttttgtagtcttagttttatactttctggtatatcaattgtaagttccgatgtacaaacactaaatgatgagtttcgggtcatcggggttgttttgatctgagaacagggggtaaaatttagttctaagcatattatgttgatgaattgaaatattttcagaatttgagtcaaagaatggatcatattgataatctgaaagaacgggattaaattcatcattcatgtattcttgattttgaaggaaatcatcataggaataatttgcacgtctttgattaacaataattgatttaatttgaattccacgacaatctaacttaacttgttttaaataagaatcttgaggtaagatagtaatttctgtttcaccctgtatcgaattattttccaaatctatatccaaagtcactttctggtatccaactttaaatctctgtgatggtatgttgtctatttcatgtttattatgatgttttttagatattttaggagttcttggagtaattggagtcctaggagtaggcttcaaagatgaagatatcatcattttggtgctcatcccactaataactgtgaaaacctttgtttttcaatgaatttaccaacacaaagtaaatattcaagttgttgttaattgtatcaaaagctgtgaaattcatgttgccaccaacgaagtgtaaaattcctcgcaaaatcagcaaaaccaaaactaaaaagaaagtgaaaattccgatacaattgtttacgtcatcagcttagtggagaaggaaaatttatggtttgtgttgtccttacagagtcagaattaatacacgctccgtccaaattgttaggtgtaaggctacttggggaaggatatataatacatcttaacggaatttcatttatttttgtttcatctatctggaattgtaccatttaaagtagtatctcagtaattagggtttatatagacagtggtaggtgattatagagttactacagagactaaatacataataaaactatgacatctgacgtatcaattgaaaatcagataagtctggatgaacaaaatacgtcacaaacaaatgaactattagattcagaaaaatctttacacagtgaaactaatgataatgataaaactttaagagcttccaatttgaatcatatcatatcaagtaattcagatagtacttctgtaccaccatcgagctcagatatagaaaatcattttgaaaaattaagtatacatgttaataaagctcaaacagttaatatgggtgacaatctttctaaattgactgatgacttaaaacataatgttagtgataccagtttggatctttatagtaagatcaattccaaagattttgaaatattccactgtatttcattacttgaacataacacaaatgttgggatacaatattacatttgtaaaagaatacaaaaattccctattggagaactaagattttttgcaccacaatttttacaactgctaattacaatggaatcccaatcaatggcattagaggaaacaattaaagaaatttgtttctctgatcctcatttcagtttaattacattttggcatttacaagcaatgttacaagatttatcaaaagagcctgaaagtgtaggatttcaaacttgtaaaagattagttaatgaattacaatttcaattatttaattattcaaataattctaaaacatctaattcgagttttgcttcttcttcaggtgttatacctagacatgatatcaataaaaatttcaaaccaaatatttatccaagtattacattagcaacttcaattttagcgggtataactgttcccgagtcaacatcatatgttgaaccaattgttaaaatggaaggtaaaagagttaaaacaatggttttcgaagttgttaaagatataaagaaaagtcttactgaaaatttaactaaaaagaatacaattaataatgcactaatgggtaaaccaagaatttatgatcaaccagatttaagaagaactaaatcaatcaatgcaaatatgaaagatagaaaatcattacaattacagaaacaaagaattaactcagaatcacctaaaatgagaaagtcagaggaattaggatttgaaatgattgattcatatgctgatatgaatttacctaatttaggtaaacctgttttaaagggtaaaacttcaagaaaatcatcattatatcacgttcattcatcagcttctattaatacaacacctgaagaaaatattgaaaaatcatctaatgatagtaaaccatcattagagcaacaacatttaattagatcaatgcccgatttacatgatgatgaaaacaaggatgatgttttatctgattctaatacaaatatatcattatctgcgtctccaaattcatcatttactgatgtaatgaataattatcattcagatactggatcttatgcatcatcaattagaaattcatcagattatagagatagtatggaatcgttaccaacgagcaataataattttacaaataataataataacattaataacattaataaatcacatcaatatgtttcactaaatgaaactcaaaaggctaaactgctcaagtctagttatttcaaaaatgagacacaatttgtcattgctttacaaaatatatccattcggttatctaaagttcctaaagaagctagattatctacattaaaagcagaattgtccattttaaataaagatctgccatgtgaaatcgatataccaatgttactacctaagaataagaaaggtaaactacacaaaatttgtagaattgcaattaatgaaagtgcggttttaaattcagctgaaagagttccttatttactgttggttgaatatttatctgatgaggttgattttaatccagctacatcagcaaataagaagattttaagaagtatagaagatattgaggaatctggtgttgataagtataaatttgatttatcatataaatcttcaaagagaaatgtatcaagtggctcgacacttgaaagtaagaatgattatcaaagtgatattgaagagggtgatattgcagatatttcagttattaaaatgaaaaataaattaagtaataaaaaaataagtcaaaatattgatttaaatactattttaaatgatgaaaaaactaataaaaacttacctataccaccattaaatgctcaaactgatcatgaacataatattgcaactcaattaagaatcgcgtcaataatgttaactcaattagattcaccaaactcacttttaccacaaacacaagcatcacagattagaaatagaatcattgattcaatgcaaaccatgcaagctagatttgcggtaaatgatgatacagaagttgcaggtgaaagaaaattagcaaatgatatgaaagttgcaggtttgagttatcttggagaagattggaatactaaaaagaatagaattcgtaaagatagtaaatttggacatttggagaattgggatttattttcaatgattgctaaaactggtgatgatttagctcaagaagcatttgcatgtcaattaattcacttaatggctaatatttggtatcaagataaagttaaagtttgggtaaagagaatgaaaattttagttacatcaatcaatactggtttagttgaaactattacaaatgcggtatctgttcattcaatcaaaaaggcactggaaaaggatatgcttgatcgtaatgaaattccaataaatggtgttatttcattaaaagatcatttccatagattatttggtgatgagaatagtactaaatataaattagctcaagaaaattttgcagtttcattagctgcttattcagtcatttgttacattttacaaattaaagatagacataatggtaatataatgtttgattctgaaggtcatatagttcatattgattttggatttttattatctaattcaccaggttctgttggatttgagagtgcaccatttaaattaactcaagaatatgttgatttattaggtggtgtaaattcatattattttatgaaatttaaatcattaactaaggatgcatttaaatcattaagaagaaattcccaatgtataattgatatggttgaattaatgcaaaaagattcatcattaccttgttttaaagcaggtgaaaatacatctgttttattaaagcaaagatttcaattacatttaaatgatgaagaaattgatttatttattgaaaatgttttaatcaataaatctctgaatagtgcatacactagattgtatgatcaatttcaattattaacccaaggtatctatatctaatctgtataacaataaattaattaatgaaactattatataattcatcagcaagtcttccctatagatcaatgatggaatgcatagacgataaaggaaccataaaatgatgtaacattacgtaatatgatagagggggccattttgttacgaggctctctgctcaaaatcagtttcaaccaaaatataggttcacaaatggtgtgttaaatctattaatattagttattataaaagttttttatacggtggtaaaatcagagtaaactaaacttgaatcctttaccatttaagttataaattcttgaaatacctgttgatattttaactttacaattatctgtatcattgaaataaccgttgctatcagttatacttttatttaattttaaactgtaatcatcatttgaaatattatcaccatcagttgtattattgaattgtaattggttattttcaatactactctcatgtgaaatagttgatgtattaggtagtttagaaaattgtaaaaattcattagattgtggacttggtgtagaaaatggagttttagaagaatttccaaaatctttagagattaattgtgtataaaaagcattcaattaaccattcataccaaacactttgattcaaacacactctacgtataaaaatacttatttcttgatcttcaagtaaattcagtggtgtctctaatggtaaatactgcaggtagccaagaaacacaatccatcacacctggctgttttggtaagttatcaacttcaatatcagcgtataaaactgagctgaagaatcctgctaaaccatgaattaaacctttacgttgaggactaatagcaacacgtgattgtcttgaattgtgtttattacttgataaatgataaatttgatttgaagattttcccctgttgaattactttactagtaaatgaccaaattagttctggttcatctgttaaatattccatttctggtatcattggaacgtataatttatcaaccgacaatttagatgctaatttccataaatgtggtgaatacactggtgaaatgtaagaattaagcctttgtggaatgaaaatacaattttcatgacataagtcagaggatgatacactatcaatacattcaggcattaattcattacaaccaaaacttcctattaattcagatatgatcatatcaaaaggttgatgatagttatttattaagtcttcatgattttgataatttcttagcgtccatattaaaaatattgacattattgttccataattgtgaattcttttgatttaagtaaataatcacattagaatttttttcaattgcagttattttaaagttagatggtgataatgataggaattctaaagctgagaagaatctatcaatgagagggcctctacctggacctaagaataatatatgaatttttttattgttctgtgaagttttcaatttagacaggtcaatcagtgccttaataatagctctttcgtattgttcgtatttgaaagtatcttgttcaaaaactttataagtataattttccaaatcatttaccagaggttccaatggagattgtaatataagtgaaggattagaagacaaagttatctttgattctttcaaagcattcaaagtaaatgaatacatataaggtaataaagtttccttatgggagatatttatcaaatgttgtaagtaagataaataggtggatttatttaatttattatcatattcaattaaactagttgatgtatggttgctgtgaggactattggatttatcaattccatgtaatataaaaataggagtatctaaagttttatattttaatagtttccaaataattaattgattaaatttgtgtaaaactggataattttttgcatttttaataaattttgatgaagatataagataaaatttgattggttctaataaccatctatctaaaattgcagcgggtatattagtatttgatgcacctaaagcaacagaaagattaggattataatcacatatagatcgaattgaattccaagtttcccaagttgagtaaatattgaatagatcaattgaatcattattaaagtccaaagatatgggtaaagaaatcgaaatatgaattgaagggaaaattgacaaaatatttgaaacatttgaagaaaatatttgaatattatttatattcttgggtggtgttaaaataaaagtttttatacctaaataatttgcataagatatttcattgtatagtacttgaaatgaaaattcattaataattgaattataactatcaagttcaatccatgaagaaattaaaccaattgtatgttgaatgtgattaccattaaatagagcagtatcttgtaattctgggaaaggtacagttaaagtatctaaaatatattcagattgagattgaagttgaagttctgatgatgtacattgttggaaataatctttacacttttgtctataaatatgattagttataggtaaaataaagcaattataaccgatattgaaaagatgagatagtaattggctatcggattgtagggactgtgctatgtgggattgtggttttagacctaaagtagccattatttagatattccacggatgataaataaagagttattgagtgatgtgtagacggtttgtaggatagaatgaaataagttgggatcgaaacaatatagaagatgaaaaagattggtaaacttagtttttcatagaatattatgaaataagtacaaaattaaattaactaaattaaatagaatagaatagaatagaatagaatgaaagttaaaaatcaaactaaatcatttgacaaagtaaagctaataatagtaaataataataataataataagaaataaataaagttataaaacacttcccctgattcaatgtaatgccattgctttaaatttcgtgacagatcacattacaataataaacgaatctactaaggaaccagctttctttccatttcccatcacgaaaacgcgagaaatttcatttttttctcccactttcagcgcttccactgccccatttctcgctgagtcgtccttactcaccaaatttcttcaacaactcagtttcacattttttaaagggtttatgtattatataaacacaacttggttaccatgcaacaacaacaacagcaacaaccaccacctcaatcccaatctcagtctcaacaacaacaacaacatgtatcttctcagaatacaagaccaaaacctttaacctctcaagagagagaacgtattttcgcttatagagataaatactattattctccaagatactctgatgatgaatatgaatatagacatgtagctctgcccagagatatgcttaaaattataccttctagtttctttgctgagaatggtacttttaaaatactacatgaagatgaatggagatctcaattaggtataacacaatctttaggttgggtacattatggttgccatgctcctgaacctcatatccttcttttccgtaaacctaaatgatttaaatttctctaattaatgtccaatttacaattacatttataattaattgattaatataaatactttatatactttatatactttatatctccattcatttctacttttacacattaaaccaaactaacctaccgacctattctttaattcgtctaatggtagttgtaatattaagggagacagtcaaatctctccataacatcaccatttttcaatttaccttcctattcgggaagttttttgtttccttcgagggcaattgaatttttcaaattttgatacaatagaaatagtttcatttccattatcaattatacactggctcatccttttcttttttttactaaatccattcatttatatcaatcacagcttaaactaacaaggtatcccgataatggaagaggaagatactcttcttaaattatcccagatattggatactcttgtatcacaaaattcacctggtaaagaacgtgattcaaattcaattaacgcgttattaacctcagttttgacttcttatcagaatagatatttagaacccccttcaacgaaacctaatcaaattacggaatcattaattgtcactaaaatttttcatgctttacaaaagatgtttgcaagaaattccttctttattaattgaaaataatcgatatctaacaatacttaaatcaacattttcattctttgattgttttaattgttcattggaaattattgataaaataatattctcattgattaaaatttgtgcttattcatttaatagtggactgctcgtacataatcgtatattatctcaacaacgaaattatattttaaaatatttagataatattttatctgatataataaagtcatttacaaatacaaattcaaaagaaacagaaataaaacatttagtccccgatgctaataatacaaatactctcttgatggatgattttagtaattacaatcgttccaaaatttctaaaatttcaatatcaattaaaatactacaatttataactcatccttcaatactgaaaattacttttttcacaagacaatatatcatacacaattgattcatatataaccaaatgctggttttgtttagagaatatcgtaattaatatcaaattcacacctgaaaatacacaagttattgatatattagatcatctatattcatcgttattacaaacaactacaatatatttcttaaacgatgatacgaaccaaattgctcgtctagaattggcagtaaacacataccataaaattatcaactggtcattgttgaatcatttcactgcaattccattggtgttggcacattctttaataagtatatcacttaaattagaaactttagggaatacagaatatttatggaataatatagggatatctgatgcttcattatatcatttcttacatttaatagatagaattgaagatcatgatttaaaaaattgtttgaaattattggtatatgctaaatttatgaaaaataataatgaagttgaaagttctaaaacagaattagaaactcaagataattgtcacttcattaataaaaacattgtcccttcaaatatgaggatataactttgtttaaagatatagaactagcaattcaaacatttaagatttaattacatttttttcaatgaaaagggaaaaaataattgaaagaactgaaaaactatacttggaaactataaagttatatgaagaaaataatattttcatctacttataatatcaacgctttatcgtgtttggaacttcacaacttgatagaatcacttggtgtatatgcctgttatttatcgggttctttcaatgtatcatcccaatgctgtaaaatatgtgatgtttgctatccaatttcttcctattctgctaaaaatgttgataagaatagacccgacactgattcaaacaaaaaagttattgaaattatagaagtattaaaacaactaatggtttttgggatggaaaatcgtgatacacatgtaactatcaatgtgataatggctttgattagagtttatagaaatttccagcctagtaatgataatacaggcattgcagatcctataatttggaaattcatacaatattcatttgaacataattacagagaggtgagaatgttgattgttaggctcatccctttattcattataagatatgatgataaaattttgaatgataatttagataaaatcctttgttacatatggagcttccaaccaaataaagagaatttacacgtttttgaaggttgtattgttttattgggggaattattgatggtaaaatcggtcgatactcgttattatatattgttgaatcacttaataaaattcatgtcagatcctgatgaatttagatccaatttagctatatttgaattgaaaataattgcagccactaaaggtgttacaccatggaaaattgtggaaccatttatacctttaattagtagagaaattgttaagaatagaagttcaagtcctggtattttaacaaatttttgctttgctattgagatgagtcaagttcttttccttgagagaactcttaaatttacagttccattcttagttgattcatataatgaaaatcatattgcatttatagcatctgttaccaagaaaagtaatgctgatttaataaggtcccatttagatgaaattttagcgtatctttttgctaaatatgataatatatcaccacaaaagataaccaaaattttatcaatttatgataaatcttatgccaactttggtttagacgatttaatacatttttgtaaggatccattttttctttacaacctattatatcattataattctgaatcaagtacattagaaaggattagatcttccattggactgataagtaaaactatcaagtttgatgaaaatgaagatatagcaattgaaaaaatgttagatagatggtttttaattataattcaaatgatttcaactacactcaatgataaaaagggtagtaatccattcactgttaaaagttagagctattaaatcaattggctgtttagcattattgtataaaaaatatgaagcatatctgggtcaagttgtatctgcattacagttagctttgaattatgaagaattgagaactgaagcactcatctgtttgaaaatggttattgaaaatgttgattctaaaaatatggaatatatttttgatactttattatcacaatcaattcaactttttgatgaattcacagaggaaaatcaaaaactttctactgaaattatattaatactgatgaaacgggttcctaataaagatttgagttacagatatgcattacaaaaaattccaagtttcaagaatattagcttccaacatgtttcagatcgaagactggttgctgatttcagaaataggatgagaagtgataataaatggattattgaacaagtattggatgatttgatagagtatcttactatgagcaaggtaaaatatcaacaacttatcaaagatgatgaactgttgttaatgacatcaaaaagtctatttgacatgttgttaactaattctttcaaattttataattcacataataacgatggtagtgctaaagatgacaattctcagatttcaatcaaatcagctaaggtttttgctttgatgggtaatctggaaccaaataattcttcaaatgggagacaaacaagtaaaggttatgataatgtaacgaatttcttattagtgacaaatttgcaaaaatccaaatctagtgatcaagaaactaaccaaacacttgttgaattttctatgtttttcttgaaaaatgtcttggttcgttcatttttatcatcggtcaatcctgaggaacaaaagtatctttctttcataatacaagagtatctttctatttttgatataccagcattttcatgggatagacttgatgatttgactaaaaatattttaacccctttgaaatattcaagatataaacaaagtgtcaaacctaaaaaatacagcttcccaatctataagcctaccaaagattataatacttggatcaaagaattggcaacaaacactctttacacttgtgctgcaatatcagagaatattttcaaatcaccacctcaaattacttctatatgtaccattatcccactccttgatttcaacattataagatttgttattccttatgcagttttatttttaattgtcacagaaccagagaatagtaacgataaaaaacagttatacgaagagttcaaaatagttttggagcatgatttacattcagtgaataatagtgttgttaaggaaggtttgaaaaaatgtattgtgacaattttggaaatttttcaattcttaaaagcatggaatagtaaaatatatgaagaagaagatattggtaggtctaacaataaggcacatactaaattgaaaagaactggtattctaagagttgaaaaatttatcaatttgttccctgctgatgttttagccaagagatgtgcagaatgtgatatgtatgaaggctcgatcttgtttttagagaaaagttacaatgaggataaaatggaaaaagatgatttttttcacaagcttgaaagatatgtatgttcaattggaagattatgatcaacttcatggtgttttaaagactttttcaacaaacagtttgaatgataaactattggaattcaaatataacgaagatgctcaagtctctaatgaatctttaaatgcaattgctcagtatgatcttagatgatattgccgataattttaatgaaaaaaatgatgaacgtatcagtgttataaaccattcagctactgaactttttgaagttttaaataaaaactgtgaatatgatcaaatattacttaatttgaaaaatttcaaacagaaaacagtttccaatgtgtcaacaatgaactctgaatggcttttgcatggattacaagctgccatatacaccggactgattgatgatattgaagaatggtcatatttaagtcaaaagtcaccattactttcgatacctggttcagatctttctatttattatgaaattgcacaagctttaatatcattgaaacataagaaaatttcaaattgtatgaatcatatcaaatcagcgactacatacattggtttagctatctccaattcagagaacattatccataggaaaattccagattatatggtattattacactcattaaatgattttgaaatacttgcaaatactaatacaattaacgataataatattcaacatatcaagagaagattacaaaattcaaaaaaagattttagatcaatatggaaaattcattcaataaaatcgaccatctatagactacatccactgaaagaatttcaagatttatataaagattcattaattgaaagttgtaggattttaagagaacatcggaaattacctcaagctacaaagtatattaccaaggcattggttttgaatgataaaagtttggataaagaaatgacccaatcttcaactcttttaatgaatgttgaattttccaagttattttgggcacaaaataattatgaaacagctttaaaaaatatgggtctggttgttgaaaaccttgatgtgaaaaatccatattatcttgaatttaatttaacgtatctgaactggttaagtgtttcagctgaaggtagtagtgatgagataatgaaaaaatatagcaccttgttaaatgttagaaattttgagtattcagcagacgtattttatcaatatgccacatatttgaataaattattggaggctcaagttccggaagaatctgatggttcaattgatatcatggtgattaaaaactatattttagccgttagatattcagaaaaatatgtacatgaagttttaccgaaagctgtcactctgtggttggattatcatcaaaaatatattgctttggaatcagatgttactaatgtaagtaagaaaattgttgatttaagaaacaatcattatttaaaactaaatcttcttgttgaaaaatgtgtttctgaattgggtaataagtggtacattgttttatcgcaaatgatatctagattgacgcatgatgataaaaaaattacagagattatatcaaaaattattattgaattaactatgaaatatccatggattttattatattctgttttttcacaggcaagatcagttaataactcaagaagagccattggtagtaaaatattaactaaattacaggattctagaagttctaaagatgctaagttaccgaagattattgcttcgggtttgactctgttggaatcaataatgtctgtctgtaatgttaataataattttaagcattcaaaatctggaaatttggttaaagacttatacaaggatcttaattttgactaccctagagatgctgaatgctattcattagctttgcctattaaaagtaatatggatttattgtacaacctaagaaatgatattgataaaagagtggtcttttatcatagatttcatgaaaaggttaagattctattttcactacagcaacctaaaagagttaaagtcactggaactaataatatgatctactatctattatttaaacctaaggatgatttacgtaaggataataaagttatggaattctccactgttatggatggattgttgggtaagaattatgaaactaaaagtagaaacatgcatattaaaagttttgcagccactccattgaatgaaactactggtataattgaatgggttcaaaatttcattacattaagaccaattattgataaacaattaaaaaggaagaataaaacactgaatatgagaaatatgaaagcagaattcggtgatgctaaaaatgatgataagttaaatatttacaactcatatattgaaaaatatcctccggttttgggtgaatggatgattgagagtttcccgaatatgtctgaatggtttaaggctagatcattattcactacttcattagctgttatgtcaatagttggatatcttattggtattggtgatagacatttagataatattatgattaataaaaatacgggtatgattatgcatattgattttgattgtatctttgaaaagggtaaaagtttaggagttccagaaattgttccatttagattaacacctaatttagttgaagcaatgggggttttaggatatgaaggatcatttaggaaatcatgtgaattaacaatgtcattaattagagaaaatgagaatattttaatgaatttccttgaaagttttattcatgatccattaatggattggcgtggatcatcttcatcatcatcaaatcaaaatgagagtagaatggaggagagaaatcaattacgtataaagagaaatcaagagcgtgtttataaaatattaaggagaaagattcgtggtgttttaactaaagatgatgataatacaaattatagagatagtggtggattaagtgttagtgttaatttacaggttgaattattaatacagacagcagttagtgctgaaaatctatcaaagatgttctttggatggatgccatttttataaaagttgttataattaatagttttttaagtgttttaaacaaagttttaaaaatacaatgtacatttcaataaatatgtgtaaattaagtaagtagtaaattaatcactgaattcttcttcagacatattatcactatctgcaatatcttcatcctcatcatcatcatcttcactcatacttgcatcatcatcatcatcatcattttcttcactataatcttcttcatcttgaggatcttcatcacttggatcaaaatcactctcagcagattcttcctcttcttcctcttcatcatcttctccaccaccaaggaatgaccaaccaccatcttggaaaaatccatatggatcactttgaatagttttcataattgttggccaatttaagttaactggaccttcactataaggaatatcaacatctgttaaccatgctttaacatcttctaaactttccattggaattgtactaacatgaacaacaggacgtgaaaaatctttaaatatgaaaactaaatcaaaattctttaaaccaaattgaacacgttctaaatgtgcaacttcaacttcttctaatgtaatgactaaaaatggtaaatcgattaattgaactaaacaatcacgtgtaggtaaacaaacaactgcactacgacttggaacaccttgaaatcctaattctctgaatggaatatctaaatcaactaaaccgttagacgaatctgaaattgcttctgagaatgcacggaattctttatctaacattgcacgacgacgtctttcttcttgttcttgttcaagttcatcttcatcaccataacgatatttacgttttctattaccagtttcatcaatggacatatcagttgcttctctatagaattgaacatcataagttttctttttaccaatcataattggtgtacgtaaatgtgcatgaataataactaataattcacctttacatgattggaaaaataaatgtttgatattactgaacaaaacatcaactctttgatctcttgttaatgattgataacgaataccattttgatgaattgaaacaaaacctggaacacgttttgtatcaggtgttggacgtatgaaaacattatctaatcttcttggtctattaacttcaattaatgaagcttgtgttataacatcagctctttcacgtttttcagattcacgtttaactgcagcttttttcatttctgaaattctctttaaaacttcagtcattctagcaccatcctttgaacggaatgttaaacttctaataaattgtttatcatcaccagtttcataaggtaattcttcacgttttgtaaccattaaaccaggagaattaaaatttaaacgtaagtgagtaaaatcaccttcctcagttttggaaccatttttatatgcattaatatggaaaggaacaggacgacctaaaattggtaaaatgaattgtttgatttttagaatcaatatgaatttttaaatctttaacattaccaggaatttgagattctctaacataagattcatatcttctgaaaaactgcacgttgttcattaccatctttagcatcttctggattataacgttccagaccttctttttgacgtttagcagtgtaattcttgttgaatctccttttgaatttgagcttgattatccttcattatttttttgttcagatctacgttttgcctttaaaactcttgtattaccataactttcagccttgacagatgaagggttctgattttacttttgaagatttagaattttcctttttaattggttcatctttaatacttatattttccttattatcaccatttctattattttgatcattatctttagcttcggattttaccttacttttatcatcatcaaaatagaatgcaatatcttttttcaattttggagattcagttaagataattggttcagaacctgtaattctaattgtatcggacaacaataatgcataattacccttttcagaatcatttaaattgttaaaacctaaaactaagttgatgactgaattttcctttaaagttctatcatttttagcattaataacaccagatgaatctctaaaatctataccaattaaagaaccaatatttttaacaaaatgatctttcaaattggagtttgaattttcaataaattttaaagcttcattatagagagtattaaatttaataccatctttagtaaatttgaataaatgatcttgtaaagagattaaaaattcataatttttttccatttctttagaaggatcaattaagaaagttcttgaaacatttgaacaataattaaaatatcttaaaccaagagatgacataataacaggacctgataatttatcatttgaagattcgacagaaaatttcaattcatatttaccatttgattgaacaattggtttataacaccaatctaaattatttaaatcgaaatctttacctaattttttcattgatttatttgaatcaaaagatttgaagaatttaccatcatcaattttattttcaattttgtcaactaattttgaatttgtaatatttaaatcttcatcaataatctttgacatttcatcagtaaagaaattcatcatattaactgaagcttttgatgcaattcttaaatttttttgttcatcatcatctttaaattctaaagtttcagataatcctaaggaaacatcttttaatgataatttagattgatggaaattttcccaaagaggatcccattcattcataaatttaccttgaaatttatccttttgtaaaatacctattgaattattaccttcaataagtgaattttcaatatctttgaaaaaattttcaaattgaattttattatgatttggatctttatttcttgaataaattacaatattattattagttgaattaattaaaggttgaatatattttgcctttgaaacagatgtaacaaaataaattttcttacttgtaatatagatagcagttgcagggaaattcataacctaaaagccaattatgtaaaacatgttgatttttgatatggatttgattcatcagatgaaccaacaactattaaaataccattaactttttggaaagattcattattaactagattcttttgtactagatgcaatcttcttctaaaggaagtaggatctatcctaatatcggacattagttcagcagcttgtagaatggataaatgccctaacccaaaagaaaagacagtacctgttgtttgccatcagcaatattattcttgaagctgagcattaaatttcattaaaatttccagtaactttcctaaacgcgtaataattttaaaacggggcaattcttatgtaattacgtaatcaataatatataattacgtaatgtataaataatttgtttcaggtgtacagattaatccaattttttgtattttcattgcttttactattaatattgcctaagcttgatagtatagtaagagagataatattaatattgacaacatgagaatttacatcgatgatctaaaggttgtgtatttttgtctggttttcaatgtttatttaatattttttatattttatactttatttttatacctatccttccttattacacaacttacctaactaattaactatgccaaaggctgacgaatacggttatgattatgaatttttattcaaagtagttcttattggtgattcatcagttggtaaatcaaatttattatcaagatttactaaaaatgaatttaatccctgattcaaaggcaacaattggtgttgaatttgcaactgcttcattagatattgatggtaaaaaagttaaagcacaaatttgggatactgcaggtcaagaacgttatagagcaataactgctgcttattatagaggtgcagctggtgctttagtagtttatgatattacaaattcagattcttatgaaaatgtttcaaaatggttaaaggaaatgaaagataattctgatgctaatatagtaatagctttagttggtaataaaagtgatttaggtcatttaagagctgtaccaactgaggaagctcaaaattttgcaactgaacataatttattatttactgaaacttctgcatttactgctgataatgttgatcatacttttaaacaattaatacagaatatttatgaaatggtttcaaagactaaattcgatattaatgatgaaaatagtaattctgcaaatgagattggtaagggtaaaacaattcaattaactcctgctccaaaggataaaaaagtttctaaaaattcaaattgttgttaggttatagaaaacttatatttttgttataaactttttattcattattattaccgttatatatctctttctctctcccacatcttttactttctattcttaattttttgctatatatatcttgtataccaaataataatataatacatattataatatacactatggtaatgctcgtgcactactatttttgttcttccttttccttaaaatcatcatcttcatcctcatcatcgtcatcgttatcaccacctttattattagccttctcagcatctaattcagcttgaatcttgctataatcaacaactttacccctagttcttctaccttgtgtaataatattagttgtatcaatttcagctaaatcatcatcaacttcatcttcaataattaatttttcatcatcaatttcatccttttcatcatctgaatcatctgaatcagtctttggttcttcaatttcatcatatttagaatgtctacttctcttcttcttctttttcttcttttctccttcttcaccattattttcattctttctcttttcaccaactgaattatttgatgattcttcttcagcttttttcaattttttcagtttcttcaactttcttgtcaatttcacttgcaattgcctttattgtccttttcttcactcattatatgccagtatataagcctactaaatgtgaaaaaacaaaagaaaaaacaccactaataaactgtggaaaatttcatgctctctgtatttttttacctttacccgcattgacttaccagtaatccctataataataaataatagaaaaaaaccttatgatccataatcaaggcatcgagattgactttcaatcttctttacacaaccgcattgcttattataagaaacgaatataagggattctataaatatacatagaagaaaaagaatatgtttgatagtaaacaatttatttataataagaataaaccaaacaatgacttaatgtcatttcataaagataaattcaaggatccagttactggaacttactacaatcggatgacttaaataaaaataaagaattatctgattcacttattacatatattgatgatattagtgatgaaggtataaaactttggtgtattgaatcattaactttactaagagatttagaaaatttagagaataatttaagtaaatgggaattcctggcattggatcatacaattcaaattgaaattgaaaataataggaaaggtattaataataatgctaggcaagctggaatatcattgaaggaagtaattgtattatctaatagatctaacatgaagaaagcaactgctgacgaagttttaaatcagtcagaaaaaatcaaatctttattattggataataaagttaaaattgatgaaagcattgagagagctaaaaaggtttctaaaaatgctagattactcataagtgatgcaggtacaattatggtcaaattaacaatgaggattgttaaattagccaaatatttagatcaacaagttaatattggttattcaaaagcaaaattaattaaaattggaattgatgttgaaaccatactaattgaaaataatgaactactagaagggttcaattttgatgggtatagagactatattaatgaaactttagatgatattttcaatgcagttactaaaaataatacaaaacttctttggaatgcattaagaaaatttaatacagctgaaaaaacctttgaaaaactacttcaaaaatcaaaatcaaaattaaagcataaacacaaacataagcataaacataagcataagcatggtcatagtgatgatgatagtcgtaaaattaagtataaacataagcataaacatatagagaaaagtgatgaaaagaattcaagttcggataaaatcagtgtatcatcacctacactatcagaggttaaatctaagaattcaagtgatgtagatagttccaagacattggtcaatgctggtgattatcaagataatgctgataagaatgtattgactaaaataagtgccagggaaacttttaaggatgatgattctttattaagatctaatattgggaattatatgcctgaactactggctaaatttaaaaaaggagatgatttaagtggaaaatcagaagatgaaagtaaagatgaaaaaatagagacacaagcttccaataatgaaaaggccaaatctgaaataattatagatgataaacatgtaaagccaccaagtttaataacaaacttgttgagttcattttatcaaccagtcgtttgtcatactttcaaatatacccttaaatgaaaccaaaactattgaatataataatgaaattgatgatgatgatgatgatgatgatgtagaaaataataaggcaactgaaaagaattctgttaaactgatagaaaatgatggtaattcggatgataataaattaactgaaaagaattccaataaactgatagaacttgttgaacttcaagctttagagaccaaagttaaattatcagaatcaacaatgcaactcaatgaaatggaaaataatctagagagacaagaatcaacgtttaaaaagcctaccgtttcagaaatgccaagattagctaatttattgaatcatagaccaattgctggaacttctggtaaaatattgaatatacttaataataaatagatgaataaatgaatagatgaataaatgaatactagatgttacatagaatactgattttaatatattaatgatttttatatcgtatatagaagtttatgtacagaaatgaaaaaaaatggttacacaagaacatgatattcattttaatgataatttggaggtaattagaattgtgataaagcatttgcagctctactgtaagaactaccaggatttaaatcattagtatcatcaactctaacaagatttgatctgataactcttggatcatttttcaaagaacgtaaaatttctctctgtacagcacttgaagaatcaaaaagcattaagaaatgtgaaccttggaaatgtctttcaccagctttagtcataatttttaggtaatggacgacaacctaatgaaacaatttctctcactacacctttattattaataactaatttcccaatagttgaggaaagtgcctttagcttcagcatgtacaaaatttggattgttaactcttgcaatagcaactaattcgtataacatcttgcctgttcaatgaaatatcaatacaaaagcactctttatgcatcagattggaaattcatgttgaaattttaaaacttttcttaggatcgctcttatagttaagtgtttcttactgtgttttgtatgggatatctcttcttttgctgtgttttatatgagtattatgggttatgatgtatctgtaatggtgtattggtggtatagtatggtgtattgagtactattagttagtgtatagtatgctagtagtgttatttgccctaatttaagtgtaatatacgtattgtaagacatcgacgcagagacggggtggcgtcctgttcggtggctgattaaattggttttacaatctttaatctttacagtatattaacattatatctttctttattgtagttctttatttgatatagattatattgccattagaacaccgctcaagagatgtttcaatggatgtttgggaagaggttaacacctcaggaacaattaagaaaaaatcaaagacaattagaacgtacacagagagaattagatagagagaagggtaaattacaacaacaggaaaagaagattatttcagatattaagagatctgctaaagaaggtcaaacaaagacgatgaatattcaagcgagagatttaatacgtacaaggaaacaagttgaaaaattcgataaaatgaagatgcaaatgcaggcaatttcacttcgtttacaaacaattagaagttcaaatgaaatgactaattcaatggcaaatgcaactagaatacttagtggattaaattcaggtaatttaaatattcaacaattaaataaaatttctcatgaatttcagaaaaatatggatatgatggatcaaaagcaagaaatgatggatgatataatggatgatatgatggatgatgaaattgatgaagatgatgaagaagaaattgatcaagttgttagtcaagtattagatgaaattggaattggtttaaatgataaattaggtggacttaaagttaactctggtattaataatgataataatgcaattcaagagaagtgcatatcaaagaacagccattgctacagcatccggtggtggtgcaagtgatgaagatgatctacaagcaaggttaaacagtcttaaaaagtaggcaatatagtattatattatataaattacgtaatggttaccatactaattttttttaaattttaatgttctgatttctctctatcactgacatcatggcattctcctctctttccagtttaattgatttgatgtatacacgttttcttctacttttatgaacagttattgttgatcatagtatctatacaacacacaggcaacacctataatcatactttaacacaatggtctttaaattcaataaggataaatcttctaaggataagtccgaagaatcacatcatagattctttcataaattaaaggaacatgtcactcattcaaattcttcacccaatgcatcgtcacctaattccaaatctaattctgctctgaattcaaaaactgcttcaagtacaaaactcaattcattagttaatcctcaaaggtcaaatactcctttaaatataaataaacataatcataatactagtgctaatactaatgccgcatctacggtacctttatcaaaaaatgaaattaagaaaactttagatgatgcaaaggcaggtttaccatcaattgatgatgttcctaaaattcaaaagaaaatgacttataatccttatggacttaatgcaattccaaatgctggtagtggtaataataatggtaaatcaactttacgtacttttacaattgatggtgcaattgaggatgcaaataatcaattaccaaaaccaatctcaaatccaaatgattatttacctgaaaatttccaaattcctgatcctttattaactgatgcttatcaattaactccaaatgagaaaaatattggtgttggtgcatctgcttcaattaaaaaaattaataaaagaggtaattcaaaagatgtttacgctttgaaaaaattaattttatttaaaggtgaaaaaccagatgaattttattctagagctacaaaggaatttattattcataaaaatatttcagatggtttccacattgttaattgtatctcattagttagaattcctcatataccttttcctcaagatatttcaagtggttggggtttagttttagaactttgtaaagcagatttattctcaattattgaaaaaaaatcttgggttacaacaaaatcttgtgaaaaactgtgtatttttaaacaaattgcatttggtttaaaatttttacatgatcatgatgttgttcatagagatttaaaacctgaaaatgttttacttgatatgcatggaattgttaaattaacagattttggtgtttcagattatggacatgaaattcctggtgattttttttcaccaattgcattaacaacacaattagttggttcaccaccttatcaaccacctgaagttcaatcattaaatgaaattgaaagaattaagagaacaccttataatccatttttaatggattattggtcattaggtataattttatttgttttattttatcaaaatgtaccattccgagaatctgataaaaaatgtcaagattttagagattatgatatgtcatatgataaattttgttcaagaaatccaaattttagaaaagataaattagcaccaaatttaactggtacttcaccaactaaattaactccaaagggtacaccattattagattctaacggtacaggtactgttaataaatcaactgatttatcatcaatttcaagaatcccaacaattcaaaatttttcagtacgttcatctgctgcagtagcacgtgctgcaactacaccaatttcattaccattaccaacaccagttagttcatcaggtttatcatctactataccaattaattcaatttcaaaatctgaaccaaatgatgaatttaaagatgctcaaaataatttaagtaaaactaattcaaattcaagttcaaattcatcaattaaaagtgcccatgatattactacaaacagtacaacaccatcacatattaattcaagatcaaattctagtacatcatttgataatttcagaaattctagttcaaatttaaatttattaggattaaataagttcccgtcaccgggatctgaatataaatttgctaaaaaattctcaagtccacaaattgctagaattgcatggagattaacagatccaaaacctgaatcaagatggggtctttatgaattattttctgatgaaacatttcaaaatttggaaatgtgtgttactgaaggtaataaagaaggtgtatatgttaatgttgaagaaagtgaagataatacagaaagtaatacagaaaatgaaaatgaaaatgatcatactgaacatttacatcaacatcaacatatcaatttaccgaaagaagctagtgaagaatctaaggatgatatgttagaattcaatccatcatcagttggtatatcgagaagtgaatctgagagatcaatatctacaacaattcaaatgaaatctggagatcatgtaattcatttagctaataatttagaaaatggtttattaattacacctaatgaaactactaaaaaggcaggtaaaacattatgtaagaaacataatcatttactgacatattaatatttataattccatatataccaatcaaacttactgtttatgtaataaacaatcacaataataatcatataatttctgctcacaccactaatatatccattttaaatcgtaagctttcattataacaaactccgaaaaataaactttttaatccctcactgggtcttcccattgaaataaactcccattcttccgcctatatttttttccactgggaattcccgcactttgacacatttaaggttttaaaactcacccatactacggattttgcaccggattttgaaacactgcatgcgtgcactttgataatggtctgcatcttgctatgcttcttgctatgtggtcagtttaaacccacgttcacatacgatgatggtcttattatttttatgtgtggataagtatataagtaccatgtaatgtaccttgtgtatattcttttatcatagattgtatatgatatttattattctattaaacaaacaaaaatgtctgcaaagcaattattcaaaatagttccattaacaccaactgaaattaattatttacaaagtcttgcaccagttgttaaagaatctggtgttactgttacaacaacaatgtatcaatatatgttcaaaacatatcccgaagttagaacttattttaatatgacaaatcaaaaaactggtaaacaaccaaaagttttagcattttcattatatcaatatattttacatttaaataatttaaaaccaattgaaggttttgttaatcaaattgttattaaacatgttggtttaaatattttacctgatcaatatccaattgttggtaaatgtttaattcatgcatttaaagaatgtttaggatccgcagctgatgattattttgttaatacattatcaaaagcttatggtaatttagctcaaattttaattaatgcagaagaggaacattatagtaaacttcaatggagagatttcaaagattttaaagtaactaaattagttaaagaaagtgaagatgttacatcagtttatttgacaccaattgatggtacaattcttaatccaattataccaggtcaatatatttcacaaagatggactgttaaaggtggtgaaaagagtgatgaaaatattattgattcacgtgaatattcaattagtaatgatttaattaataatgagtatagaatttcaggttagaaatattggtaaagtttcaaattttattaataatgaattaaaagttggtgatattataccagttcatgcacctgttggtaatatgacgtataattctgctgaatctaaagaaaatttaacaattttagcaggtggtattggtattacaccaatgattacaattattaatgctgcattaaaggatggtaaaaatgttgaattattttattcaaataaatcagttaatagagaaccatttagagattattttaataatttacaaaatcaatacccaaatcaatttaaattacatgaatatatctctgaaaatggtcatgttttgaaaactagtgaattaaatcatattgataataaaactcatgatgtttatttacttggtcctgttagttatatgcatgaatttaaaacttatttacaaaataatggtattgaaaatattaaaatggaatttttcggtccaactgatccagattgttagctgttagagtttgtgtaatgtcttgtataaaagtttaggagaagctataaataaaatatattattatttaattattgatttgatttgatttgattattaagaacgtatataataatctatttaaaaagctatggataaccggagtaaaaaaaaagaaacataacataaaataaaataaagtaaagtaaagtaaagtaaagtaaagtaaaagaagataagagtaagagtaaatttgtaaattttagtaaagtgtaattaatgtggggtataagtaaattaataattaataccaacaataaaaataacaataccaacaaatcaataaaaataagttgtaaaaataagtaaatataataatggaaataatggaaacaaattacttccttggttcttttggttttaataattcaaaactgcacattagttttttattaacattcataacagcaccccaatttttgaattcaccacaataatttggtgcactaaaaatcgtaactaatttcctatttgaataaaattcataaccatcttcgacaaccatatgacctcttgcaattaaatcaaaattaaatcttgaacaaaatcttttgatcactttatcattaaaacaatatgaaacacctctatcatttggtttccaatcactatttgattttgatttggaattagagatatgctttgaactagatgtagatgtagactttgaatttgaattttcattagatggtggagatattgacaatgggcctcttgtagattcatcatttttatcttgaggatctgaccataataaatctgctaataaaccttcatctggaatatcagttggtctttgaatttttttaatttgatttaaatcttttaaatccggtgataaaccaccatgaacacaaaaaattttatcagcaattgttgcagcaactggtaaagtattgaaaacatcaacaaacattttccaagttttaacaccattaattgttcttcttttacattcatcatagaaaccatacattttagtaatttcagcagattcatgattacctcttaaaaggaaaaaattttctggatatttaattttcaaacacaaaagtaagattaaagtttctaaagattgtttacctctatcaacgtaatcacccagaaaaagataatttgaatttggagggaaaccacaaagtttaaaaattctcagtaaatcattaaattgaccatgaatatcaccaacaattttaactggagcagctaattctaataacattggttgattcatgaaaattttacgagatttagcagatataaattttaattcatcatttgaaattggtaaagttttataatattttttagataaaccagttgaaactaatttttcaataattgaatcaatatcgatattaattttaattttattagatttatgttttgatagtgaaggtgaatgagattgtttttgtggagtagtatgagtggagatattggtggtggtagtagtattaggtaaatctaatttaaatggtaaatcatttgacaaatttgaagatggagaagttgaaggtgaagataaattatctaaattatttaaattattatctttaatagaattaaaatttttattagtaattaaggaggaagcagaagagaatggttgttgattattgttaatataagaactagtagttgaagtaaagatactatcatcagaggaatttgaagattctattggaactgaatttatattatcattatcattattattattattattattattattattattattattattattattattattattattttaatattattaatattaagattgttgatattatttgataaatcattaatattaattaagttattattatcattatcattatcattatcattatcattatttataatataatgataatgcggtatgggcaatggatcaggatcttcttgagcattttgcagagaagatgaagaattttgatcagcaccagattgattctgcggggggtttgaatttgatgttaagtcatttctactgggagagttgcccatattctagatatttagagtaagtaaataaagaaggatggatacagataaaaggaagatataactaataataatttgccacaatacattataatttaatttaatgtaatttaatttaatttaattattataattctagattattaattaattctgccaatttacattaaagtgtcagtaattacgtaatagcgtcacgtgactagtacggtcgatcgacccgtggtattacgtaatctaacttcaaagaaaaaaagaaaagagaaacccaacaaaaaagctcacctacaaggctcagcatataactttgccaacccaacagaaatttaaaataagagaaacaagagaaaaaaatttaaactttcgactatctccacagtgcttaattccaattgatgtaagaactatagtaataatatatagccttaaagttactacttactgtctgttttgttttcgtttggctttacctcctctatatttcttttctctttatctttcttgcttaacacgttattgcagattttttttgaaaccttatcgtctaatatttgcttgtttgcctatccttaaattattactattctttttcaattatccttgcttaatcttttactgttattcgtattttgcttaaataaatatattatattaacaaaaagaattaattaaataacaataaaatctcctataaaatttaacaatgactttattaaatgtacctgtaggtgatgcaaaacctggtgaaactgctccaagaagaaattatttagttaaagatgctgctataattagacctaaagaggttataagtgttcaactgtttatgaatttttcaatgaatgtgttaataaacatggtaaaaattcaaattgtcaaggttggagagatttaattaaaattcatacagaaattaaaaaagttgaaaaaattattgatggtgaaaaaaaattagttgataaaaaatggttatattatgaaaaatcaaattataaatatattaattttggtcaattacaatcaattgttaattattatggtaaaggtttaattaaaattggtattaatcattcaaatactgataaattacaaattttcgcttcaacttctcctcattggatgagaactttccttggttgtcaatctcaaggtataccaggttgttactgcttatgattctcttggtgaagaaggtttaactcattctcttgttcaaacttcttcaactgcaattttcactgataatgaattattgaaaaaattagttaatcctttaaaatctgctaaaaatgttaaatttattatatttaaagaagatattaatctttgataataattcatctaatgatgatgatgaattaataacagaggttaaaaaatcaattgaacaaattaaatctttaagacctgatattaaattttattcatataatgaaattattcaattaggtaaagaaaataatgattcaattgatttccatcctccaaatccaaaagatttatcttgtattatgtatacttcaggttcaacaggtcctccaaagggtgttgttttatctcatgaaaatatagttgcaggtattgccggtgtttcagttaatgttcctgatactttacttaataaaagtgatagaattatatcatttttacctttagctcatatatttgaattagttttcgaattaattacattttattggggtggtattgcaggttatgcaaatgttaaaactttaactgatgcttcatgtaaaaattgtgatggtgatatgaaagcttttaaaccaacaattatggttggtgttgcagctgtttgggaagctgttaaaaaaggtattttatcacaaattgaaaaacaaccttcaacaacacaaaaaatcttttggtctgcttataatttaaaagttaattcaaagaaatatcatataccttttataccatcattagttgataatttaatcttaaaaaaaattaaagctgcaactggtggtaatattagattattattaaatggtggttcaccaatttcaggtgaaactcaaagatttataacaaatacaattgcatccaatgttaattggttatggattaactgaaacttgtgcaaatacttgtgttacaatgattaatcattttgaatatgatgttgcaggttcacttgttggttcaattactgttaaattaattgatgtacctgatgcagggttattatgctaaaaataatcaaggtgaaattttaattaaaggtgcaccagttttaaaagaatattatcaaaatcctgaagaaactaaaaaagcttttgaatatgaagaaggttggtttagtactggtgatattggtgaatggacttcaaatggttcattaaaagttattgatagaaagaaaaatttagttaaaactcttaatggtgaatatattgcattagaaaaattagaatcaatttatcgttcaaataaatatgttttaaatatttgttgttatgcagatgaaaataaagttaaaccaattggtattgttttaccaaatgaagcacaagttaaagaattaattgttaaattaggtttaaatgaaggtaaatcagctaatgatattgaagtttcacattttactaataatagtaaattattaaaagaattaaataaaagtattttagaaactggtaaatcaggtggattaaatggaattgaattaattttaggtattgttttagttgatgatgaatggacaccagaaaatggatttgttacatcagctcaaaaattacaaagaaagaaaattttagcaagtgttaaagaaaaagttgataaagtttatgctgcaaattaatttaatttcttttatgatcattgatgatggctgtgataatgtatgtatgtatatgtgattttttttataatgataagtatagtatataattttaataataataaaaaaaaaactaattaatcaattactttttttagattctaagaaattcatttcattaccaacaatttcattaaatttattaaatgcatcaaggtaaatatgatgacctgcacctggtacaatttcaacaatggaatcatttgaattatctaatttaccatttttcaaattaatattatttaatttttcacaccttttaataccaccattaaagtccatccaatcatttgaaccataaagccaaattgatctaaagtttgtaaattttaaactttcaattctatttaacagtggatttttaggtagtgcaccaggtgataataaataatttagcatatattcacctgaaccttttgcattaaaaattgcataagaatatttatgtaataatttaattgtttcatcattaaataaattattaattgaaaatctacgacttgtccaaccactaacaaaatatgaacctaatggaccagtatttctaactaaagaaaatggtgaaacatttaaattccataattttgagaaccaagttggtatctttgcctcaatttcatgagaattttcatgatgtaataccacctggtgaaactaaaattaatgaattccaaaaagttgttggattttcattagttttacttaattcttttaattgattttgaaattttaaatttaattctatattatctttactaaatctattgaaaaatccatttttatttttcaaaatttcaaattcctctttcatttataaaattttctccattaatttcattcatttgtaataatagtgaaaaataaccacccattgaatgagcaactgtaattgaattttcattatttaatttattaaatttataccaatcacttaatggaattgtaaataatttttcaactaatttataatcattatttggtatattaaatggaaatttaactcttgttgaacatccataacctggtaaatcaattgcatgaatattccaatcaggatattctgaacttaatttttcaatatttttaatgaaaaatcctaatcctgcaccataaccatgaattataactaaatgtttatccttctcagttggatttaaaggtttaacatgaaattcatttatatcagggaatagaagagaatttggtgatttaaattgttttatttcagatgaatgagttttcgatggttcaggataaaatggtaatgttgataataattcatcttgaattttcaaaatttctttacgagttttataatcttgaaaactttcattaaatgataatgggaataattttgttgaaacttgtgataatggtacaccagatggtgaagttggttttctatatgttgaagatgtatttgaagttatattattagttgattcagcttcctgtgttgttgacattgatatgattgatttaatttgttgggttttaaacggattacgtaatgatcggatattcttgggtattcgtatactaatgtgtgaatttaatataagtaatttgttcatacaagaacttttaatttagtgatgaaagatgtatgggttgtgtttatgatttaaataaaataatagaaataaaagaaaaccaataaaaaaagaaaagatcatcaacacaatataaatatgtcaacataaaatggagataagaaaatattcatgttgaatccatcaacaatacttatatccgagttttaagtaacggatttaaataaacgaatattcttttatcaataatagtgataaatagtaaaaaactatgaaggaagcgaggttcgaactcgcgcggacaatcgcccaacagatcttaagtctgccgccttagaccactcggccatccctccaattgttaagaaatacagttatatggtttgatccgtaattgctattctgctgacgtaagcaacgttaattaaaagttgtttttttaaaaagtgttaaactttataatttacccgttttttattgcttaatatcactctttgaaaaaattactagaacgttttgtaattaataaaaacatacagcagattaattattcacaagtataattttttttttaaattagaataaaattattctctccgttattatttgcctcttcatactagtccttacactacaacttatataaagacaagtagaatacaattcaatataacacaatacgccatctacaaactgagcctacctcctaatattactaattaaaaagacacgttgaagttactgaaaatttaaaagaatggcgcgtgtcatattataaattgtcaatataagctgagcattattaatatttgcccccaaagcttcactgaggtgtccttttcaattatattcatcactgatttagttatcactttctttcttttctattttatcttaactctttcttcctcaagcatacacatctataaacaatgcaattttcaattaaagctattgctgctataatggcagttatttcaaatatcacttcaattaatgcagaagaagcaattgcacctgaagattcagctgttgttaaattaactgaagcaacttttaatgatttcattactaataatccttatgtcttagctgaattctttgctccatggtgtggtcattgtaagagattaggtccagaatttgcttctgctgctgatactcttaatgaatcagatccaaatattaaattggctcaaattgattgtactgaagaaagagatttatgttcttctttcgaaattagaggttatccaacaatgaaagttttcaaaggtgacgcttctgctatttcagattatccaggtcaaagagattctaatgcaattattaattatatgcgtaaattaactttacctgcagttcaagttttcgaaactgctaaagaattagatgaaaaattagaaaaattagcggaatctttcattcttcaaatattacctgaaggtgctgaatctcaagcttcaaatgaaactttctatcaaattgctaataaatatagtgaagctttcacatttgcttcaacttctgataaaaaatttgttgatcaatatgcaaaatcttctaaaactcctgcttatgttatcttcagaaaaggtgaagaattatctgatgcttcagtctacaagggtaaatcaattgattcagactttgaattattagttgattttattgatgttgaatcaaaacctttatttggtgaaattaatggtcaaacttatcaagcttatacttcatctaatttaccattagcttattatttctatagtactgaagaagaacgttcagatgttgaaccaatcatcaagaaattagctaagaaatatagaggtgaagttaattttgttggtttagatgctgttcaatttggtatgcatgcacaaaacttaaatatggaagaaaaattcccattattcgtcattcatgatcttgaatcaaataagaagtatggtattgatcaatcaaatgatctcgataataatgatattactcaatttgttcaaaaattcaaagcaggtaaattagaaccaattgttaaatctgaaccagttccagaatctcaagattctccagtcttccatttagttggtactgaacatgatgcaattgttaaatctggtaaagatgttttcgttaaatattatgctccatggtgtggtcactgtaaaaaattagctccaatctttgaagaactttctgaattatatactggtaaagatgttattgttgcagaaatagatcatacattaaatgatgttgaaggtgttactattgaaggttatccaactttagttttattcccagctgatggttctgaaccaatctattatgatgatgcaagatctttagaagcaatggcagatttcattaaggaaaaaggttcccttaagattgatgcatttgctgatgaagaagatgcagttgttgaatccgaaaccgctgttgaatcttcttctactgttgaaaaagttgaacaaactgaagaagctgaagctcatgatgaattataatgatattgtcatttactagtattattagtattaaatattctttttttcttttataatttacaattgttcattaaccggtttatatagataaatacatcaggttgtttgttatataagtacaaaactctaatctttagtaataatttgtgaagctgccttagataatctattcataatggccaatccttcatcctcttcactaacaccttcaacgaaaataatgtcaaccttatgtgaatcctgaatctcttaatgcagcaaacaaattacgttgtatttcatcaccacttttacctaattcaatcacaacatctgcatcattgactgatttaccccaatatttggatgtaacaactgaaaatttaattttttctaagtctaattcgttttctgaagcatatttaataattgcttcattaccatctttgaaattttcaaataatataactttagcacttggtgaataatgtttatatttcataccaggtgtacgaaccttttcgtattgacctgcagtcttcttaccgagaacaatgttttcccatccatttccaattttctttatatcttctaaactaataccacctggtcttaataacattggaggattaacagttccatcaacaacagtactctctaatccaacattacattgtccaccatctataattaatggaattttaccttgtaaatcttcaaatacatgagatgctaatgttggtgaaggttttgttgatgcatttgcagagggtgcagctaatggtaaattcgatatgtgtattaatgcacgagctattttatcatttgggaatctaactgcaaatgtattttggccagctgtgacaacttcagagacagaacattcattagatactggtaatacaatacttaatggacctggccaaaatttctctaataatggtttataaatttcaggaatttcagttttaaaaacatctttaatcatattaattgatgaaatatgtgaaattaatggattatctgcaggtcgattcttagctgcatatattcttttaactgcatctgacgataatgatgatgcaccaagtccataaaccgtttcagttggaaatgcaactacttgtgattcatgtaaaagttttgatgcttcatcaagtacttttttagtttcattatctgtaaatgtaacttcatttgttttttcatcaaaaataatagttgatggatcaattttaagaattttcgtattgaaatctcccatttttattcggcaattactgaaaaatcttctacttagaaacattcattaacttattccagctaatgtgaccaaataagataaaacttaaggtttgaaaaaaattatgaaaatggtaatactaaaaaaattgacggtagatttcatgattttttcaaattactaaattaataaagtctggaaacgacgactacttcttttcgaatcgtttgcatttatttccacttacttacttaactatacccaaatgtttggatttgcaaagaaattagtcagttctattgaatcacaattgtcaattgacatatccaacaattctagctctaatatcgatgaatcccattagtggtttacgtattctttcagtgaagccaaattcaatcggttcaacacatggatttgaatcatggttcgatttcatagtggcacttaatggtatggatatcaatgcatttttagaaattaatactgtttcaggtaatgtcggttatagtaatatgattaattatattaaacatgaaattgaagtctctggtaatggtataacactttcagttttttcttcaaaaggttcaataatgagagatattgtaataaccaatgaagaattcaaaaatgcatccaaaattggtaattctgatctagaggaaataaatttaaatgctaattcaactaatgatgactggaatccaaatttaggtttatcatttcaactaactcctttaagtactggattctttacttggcatgtcctgagagtctcacccggatctcctgcatatttagcaggtataatgccagatgaatatataattcaatcacaagatggattacttgcaactggtggtgaagatttattaggtaaggttttacagagtcagtacgttaaaaatggtgatggatgtcaagttgtattatatgtttataattatgattcagattgtgttagaccaactacagtaatattgaaatcaggttcaagttggggtggtagaggaattttaggctgtgatgttggttatggtttattacatcgtattcctgaagttgtaggtaaatttgattcaattaaatctcttaatcaagagttaccacaaacgcaaggtagttcgacaattgaacaaccaagtttgcctgaaattccactttcagaaactccaaatattttaccaatgaaagtagctgcaccaagtttcaacacttcaagtgaaggtgaaactattgaacaagcatctagatcagttgttagtaatcaaaatagaaaacgtggacataaaactacaaatgtaaatgttaacttggatgactattttacagaacaaactaaagccaatgttgattcagatggtgcaagatcaacaccaagctcagcaaatgtaccaccaccaccttcttttaaaaaaatagtagaataataggattgatttgaattctataaataatatattaggttttatataattgaattttcagtaatactgtcaataattcttaagcatcaacaatatcataaagtttttccaaatcataggtctctctccaatgatcaccattcctaataataatcactataagtatacttaaaactgcagtaacaccaggcgcatatactaaacaaaacaccagtaccgatagcctttattagtggttcagttgcaaaggaaactccagccgccataatcattcttataaaattgttcaatgcgataccagttgctcctctaccaggtaaacaatctgcaagatatgtaacagtaacaccaataacaatcatttgagcaaacccaaacaatgcggttccaatcaatggtgtaacccattgttcatgatactcaagacaccaaccagtaattaacaatgataatggaagcattgcagctgcaacataaacattaataccaaatctagcttctggtgcaactataccatatttttcaatctttttctttaaaagataatcgttaaacttaccaccccaaatagaagcaataaagtatgtcactgagtttggaactataaactaaaccaactaaaactggagaaaagttatatggtggtcttgaatacatgtatgttaatgtcatattttgaacgtataaagctgcaaaacaaggggcagaatatgccattgccaatgcgacaggtggatatcttataaacacaaatgatttcaatgggccataaagataaattttagtgtaatgtaaaaatagtttgaatttactaccatgagctattttatgaattgtttcaagttcatccgctaatttcttacttttctgagattttttcatctcttcatgtttgattgtagtagcagttgggactttagataaaggaacaacagaatccatcactggcatttcataattatcatcttcatcatgtccaatttcttctttatctaaaccttcaccggaatcgattgatttaatttcatagttcatttcattttcacttggaattaaagctccttgaattcttgcattaccagaaacaacagacggttttctacttttgggtttcacagaaacaaaagatgattttctgcttctgttaatatcaccacctttattagagatttctacaatcgaacgatgtgttgacattctagtcaaaagtttattaagatgttcaacttcttcctcatcaactggtattttgtcattatcatcttcatcaaaaacattagagtctatagaaccaactggagaaagtggactttcattatctaaaactaggtcattattaatagttttagatggatttgattgggaaacctctgcattaggtaatttgatcattatcatgatgtgtaaccttttcaatatcttttgtctccttaatggcagtttcttcatctttttttacaattttatttctccttctatcacgtaaaatttgtctaatagcttccctattatcttgttttcttaaagtttcaggtaaaaagaatataattaataaacagcaaccaccacttaaacaaattaaaaaccattgagttgcacgccatccaaatttcttgttactggtaattgcaccaccaatgattggacttaaaagtggacctgcaagtggtcccaaatagaacaatcccattgctgcacctctttttgttataggatataaatcaccaattgtaccggccccaacactttgaacactagctgcacaaccaccacttaaaacacgaaatccaataagtgtattaacattgtttgccaaagcacatccaattgtaaagcataagtataatatgaatgatacaacataaattgatcttcttccatgtctttcggataaattactccaccataaaggtataacacctaatgtaataagataaacaccaattgcaacatttaaaatggtaatagttgtaccaagatcttcaactgcattatctgatgctggtaataatatagaagtacccattggtccaagcattgcacaaaatgcaataataaagacaataactcttcgtaatgaagcgggtagatttcttgcatcttgatattctgggattaaacataattttgataataaccctcttctttccttaacggggacaattaagctatcatcaaactttatagttgtgattcgggacaataaagtattggatctagttattccgttgcctagtttttcacttttcggtttatcatccacaaaagaattttcttcaccatattttgaattccccaatgatgaagttgattcatcctcatttgttccatgaagatgacgtaccgtatgataatcgtgtgaattggggtcaatatcttcactatctaaagattgtgtatctggggacagtttagaaattattatgttatgttgtcgttgatttgttgaaggtcttctattgtttgacattgtgttttatttgtacctggatacatatatctctatacttttaaaaaaaatataaacagaatcaaagtcatcgtgatattagagtcaccgaaatggacttccagttacttataagtagataaatttttttcttatcctattgtggtgataattatggaaattttcggagcagatgctgcgcaattccgaagttctttaacttactgtataaagggtttataaattactataattacataaaagatcatcatttaaatgcctctgcaacaagatctttcaactcagatgcaacagcatcatctgctactatttccacattcttggaagcaatttctttatctttaggatttggtaatagctctccaaacatgttatcgtaaacgtcattttcattaaactgtgtttcttcggcatcattctttccaaaatcatccatcatataagatttagtagcttcagcaacaggattactcttctctctcttagctagattaattttggaactcattctcttatacttttctgaatctcctgtagctttttgaagataatcaggaacgggtaaattattctttatgtagtaaattttccagtttcttgctttatccttcaactgtaatgagcttctattcttcaaactttcattgatttgaccaccaggtccatataactctaaaatagcagtccaatgtgtccctttcttcttcaaaccttccttaagagcattttcttcctcagctgtccagattcttctaaatgttgatggtctattatgtttagccttcttaggtttagatttaggtggagtggttggcattgttgatgtaatcaccatttctgatgaagtgagtttttcactgttcccatcaattcccttattatcagtatttggagtagcattcagattatcagtactgtatgatctgttttctgttattgaactatcttcaatttcagaatacgatctcttattattattattattattttctattccagaagcagcagtaactgaattattagttctagctggtatattatctcttattcctgatatttcgtctctttcagtcaatgcaaaactttcattcatcgcatgtaatttattcaattcattagccattttaccctttggaccccaaattaaaaatccaacgtttttggaaacatattctaataagtcatttaaaaacttgatccattcgtatttttccattaatgtactgtccgattctgcttttaataatgtttgttttctaaaatcacatctgtttaagaaatccaattcggcaggtgtaaataatgtttgatttctttcaattggtttaccattagattcataaaacggatctttacgacgtaataaaatttcatccatatttttcgggaataaatcatgaattatatcttcctttgatctatcacctaattcgatagctgaaatataagcttgagttttcaattcaagataaagaattgcttgtgcttttaaaaatttagtttgatttctttgtaatgttgaagttgaaccatcatatctcatatcacttgatgtcagattttcatatagtttattatttttcaaaaagcttagggaatcaactgggtcaagattttgtggaggacagaaaacatcaaggaaagcttcatttaagaagaaaaaacctaaatcaattaaacctaatgtagcaagtaaaaatgttgaaagattgacttttcttaatgttccttcaattgtatcctctctaccatgtaaaaatgtaggagctgtatgaccatatttccataatccaaaagttatattttccactgtgaaaaatggactttcctctgaactgtaaattcttttcgtcgtttcgaaaagttccaccagattactaaatgcgatacccgtatatgattctctatttgacactaactccataattttttgatatggtcccttggcaacaattctcaaaatttgggttgctagattatctagcactggtaatgtattaattaacatttgaacattaaatgataaattatcaggtgcaattaaagttaggggtaatgctgataattgtgcgttgacatgattaacttctcttattcttgatctatttgaatcgtttattaaagatctatatgcatctaatgcagattgtgcttttgagtcgtgtaaaagttcactatttaatggaatagatgtatttctttgagtttctgttgtagttgtcagtatatcgaattctttatttttattttctactgttttattttttgttgttatatcagtaaacatagattcggtttctttagaagtgttggttttttcagttgtgaaactattggatgatgacccattggtaactactgattctgattcattattccgactttcattggtctcattaatagtagcttcaacatctttctttgtttgtttagttgcttcttcaagttttttgatatcttcatctaaagtacttattttctcagtttcttctttatcttgttcttcctccactactactactgaatcagtaatagcatcattattcttctcaagttctttattctcagttttatcatcaacattattagattctgtttcttcatttaaatttttttcatcaaaataatcattttgtgttatcgactgacttaattttgaagattttgattgaatttgatcatttgaaagagtaacattatctgtcattaatttacgtaaatgaatatcaaaatcagtatcagtaatattttcaatatccagattcatttctgattcaaggaaatccatttcatttttacttaatcttctttttttaaaattttcagaaagagttgataaacttgtctctatttgatctaattctttctcaaaatttgtatcaaaatttttcgattctaaagtttgttcattatcatcttgaataacatccttatttatatcaattgattcctttgcatgaatgttattgttattgttattgttattttcatctacgttactttcatttaaaccttttcctgaactaatttcaaccgaatctgtattagatgtcgtgctgtttatattattagggttctcgttctctaggttcgacattttcagatatattactttatattatattctgattggtatctttttataattgagttcaatgtataaatgattcaagggtgtaagtaatttatctctaaataaaacttaaaaaaattgtaaacatgaaaataaagtaaaaataaaatttacaaacaagaaaaataaagaaaaataaaaaaaagaaataattttttaaatttctgtgaagcccgtcgctatcttttgctttgtatatagtgaaggtgctgttttttatattgactgtaatgatacttctatgctataccgtatctgatggtattgtattattggagtatattactaccgattacagagtataaaattgaatttaggtgataattgtatcataatttagtaaatcttatccaaaccgtcgcgtcgatgataataagagatattcaaagtatctccaattacatcttacctttttactttcataaagctgatcatataccgtacctctttttatgataccatacttatatacatcattgagaagagaccatacaacatggtgacatttaaatatgcatgtatacttttctcaattaggaaataacccgtacacctaataacatttcctaaaagggtaatgacgcgaaatgaaaatttcaaaacggcattgtaacaagacttttaaattaaagatcaatcaatcttgcaggagaagacagtattgaaatattggagaattgcactgtaccttcttctgtactccacttattagagaatgtcatttgaaagagcggatatatacacaacatctgttttgcctcctcaacaggatgcaggaaatgaccaaaacagtgaaatcattaaagcttttaaacgtttcatattagaatttagaattgataatgattttgtatatagaaatcaattaagagaaaatatattatctaaacaatataaactaactgtttattctgaagatattatatcattttatgatgaattacatcaaaaattgattgaaaatccaaaggaagttataccattatttgaaagagcgattactgaaattgctaaaagaaatatttatcttacaaatgaagatactccagttgttttccctcaatgtcaattaattttattatctaatgaagcaagaatttcaattagagatatagattcagataatgtctcaaaaattattaaaatttcaggtataattattaacacttcaatgcttaattcacgtgcatctgaattaactttgatgtgtagaaattgtagacatacattaaaggttaaatcaaatattaatttaggtttacctcaatatcctaaaaaatgtttagcacctcctcaacctgaaggtgataaaccagattgtcctccaaatccttaccttattgttcatgataaatcaacttttattgatcaacaaactttaaaattacaggaaacttcagatatggtcccagttggtgaaatgccacgtcatattactttatttgttgatagatatttatgtaatgttttggttcctggtacaagatgtgaaattattggtatttatgatacttatcagaaaaaagttcgaaatcaaggttcaattaacaatgcagctttaagaactccttatttgaaagttttaggtgtttcaacagaggcagatattttaagatcctcaggcggtttgaatagaatgttttcagaacaggaagaagaagaatttattagattatcaagattaccaaacttatatgaaaaattcgttaaatctattgcaccttcaatttatggtaatgaggatattaaacgtgcaataacttgtctattatttggtggttctaaaaaagttttacctgatggtatgagattaagaggtgatataaatgttttattattaggtgatccaggtactgcaaaatcacaattattaaaattcgttgaaaaagtttcgccaatttcaatttatacatctggtaaaggttcatctgccgccggtttaactgcatctgttcaaagagatcctgcaactagagatttttatcttgaaggtggtgcaatggttttagctgatggtggtgttatctgtattgatgaatttgataaaatgagagacgaagatagagttgcaattcatgaagctatggaacaacaaacaatttctattgcaaaagctggtattacaactgttttaaattctagaacttctgttttagcagctgcaaatccaatctttggtagatatgatgatatgaaagcacctggtgaaaatattgattttcaaacaacaattttatcaagatttgatatgattttcattgttaaagatcaacatgatgttcatagagatatgtcaattgcacatcatgttatgaatgttcatacaaatggtggtacaaatgaagaacaaactgaaggtgaaatacccattgatttaatgaaaaggtacattcaatattgtaaattaaaatgtgctccaagattaacacctgaagcatctgaaatgttaagttctaactttgttggtattagaaaagaagttaaagcgaaggaagctcaatccacagaaagatcatcaattccaattactgttagacaattagaagctattattagaataacggaatctttagctaaaattgaattatcaccaattgcaacagttaaacatgttgaagaagcaatgagattatttaatgcatctacaatggatgcaatcaaggaaggtaatacagataatcctgaagttattggacaaattgaaacaatggaaagtgaaataaagagaagattaccaatgggttggagtacttcatataatactcttcgacagacatttgttgaaaagggtaattattcaattgccgctttaaataaagctctgcatgttatggaacgtaaagagaccatccaatttagacataataggtcaagtatctttagatgtggtgtgtagattatataaatttattattatatgtattttactttaattaattactgcttttactaatcttataaattaaacaatgacatgaaaaccttctttacccttgttcaatcccttttgaacaattttttcaatttcatatggatcacttgttatctttgtgaaattttcataaccatctttagtaactaaaatatcatcttcaattctaacaccaccaacgtacatatatttttcaacaagttccatattaacatacttcttttgttcctcagttattttttcaattaaaaatggtgaaaaataaatccctggctcatcagtaacaaccatacccttttgtaattttcttctcaatcttaagtatcttaaatatggattttcatcttcatagtttggatatccaccaacatcatgagtatccatacctaaaacatgacctaacccatgaggatagaaccatactgaaacttttgaatcaaaaatttcttcctctgtaccattttgaaataatcctaattctaagaaatgtttaataagaactttatgtgataaaagatgtaaatcatcccataaaacaccaggttttatttgttccattacctttgtttgcatatctttaacagcaagataaatttctaaatgttccttggaaaatttaccagtgattgggaaacatctagtgacatctgatgcgtaacatttccattctgcacctgcatcaattaaaacagatgttttaccatccattggatcatcatttttaacataatgtaaagtgccacaagatgggccagaacaacagattggatcataggattgaaatttagaaccttgtctaattgaatgataaacaaattcggcgtgtaaatgagtttcattactttcaattggtaatgcagacataacagctaaatgacaattatcagtaattctagctgcatgtctcattaattcaatttcaaattcatccttaattaatcttgattcatctaatgcatagaaaaaatcaatatcacctgaaattacatccttagagaatggtttagttgaatactcatcaatatcagtggtataaatattaacatttttctcttttaatgattttaatgtattttctacatctttagcatataaaacttcatcaacatcgtattcctttaatgcatcttctggtgataatggtaatccactccacataatatcatcagcatcaacatctggtaagaataaggttaatttatccttaagaacatgatataaaacataagcaccagagatttggtcaatacctgttaaataatggaaatatctattttgtctaattggagcagtttgatcacaatatgggtattgttttaaaactgcagatgcaatgaaaaatgcggtgttatctgctgtagctgatacttttttatttaaaaagtgttgttgaacattttgggcatgtgcttttgcaggatatttcatcatattaatcgcagatcttaataatgattcagatttattcatcagataactcaaagtcttcaaaaatttgtaacattaaaaagttcatgcacatccaattccaaacagtgatctcatcagcatgaatccaccagctctctctgccataatataatgataccaagatagacttagctaagcgaggacttcagggcctcatggttgaatggctgattcattacgtaatgcttgacatgtttgtttgtgtggaatttactttatgttgttttatttaaacagtattataacagctggctagttggtataggagagggatattgtatgatagagaagcgtttgaatgatcaagttgaaacagagagtgagaactcatccaaaagacagaaaatagaagatgaatttgatgatttagatgatactgtaaagtatgacaatgttgaatcatcttcaaaatacactgataaagacacttatttagatacaattaacaggaagattttaaattttgacttacctagagaatgtgcaacattgattgctacaacaaatattcacatatgtttagtatgtaataaatatcttcagggttcatcaataaattctccagcctatgcacattcaattgatgcaaatcaccatgtgtttattaatactgaaaatggaaaatttattgtattaccggaacaacttaccctttcacctaataaagaaaaggaattgattgatataaaattagcacttaatcctgaattagacactgaatttattgaaaaatttgatactgaaccacttacaagccaaacattgaataaagagatctataacgtcggatttgtgccaataattgatgatataatagtgaaagatgatacctctaaagataatatagatgaaagtactattaaaatgactaaccataatgctatttattattcaattgcacatttaccacctatacgaaactatctgataaatcataaatcttctgacacaacaccattgacaaatcaattatctttattaaccaaaaagatatggtctccttatttattcaagaaatttacctcgtcttatgctattgagaatttagttgtctcttataacttatctacacaaatatcctcaaacctaagattattttacaattggttaattaacaagctcctctctgagaataaagtcttgaaaaattattttactggtaagttagttatgaaagatgttgataaggaaaataaatttgtcaatataagtataaaattacctcaacagtctattttcaaagattctatgtccacgtctattgaacaatatgatttaatgaaacttatacgagataaaggtataaacatttgtaaatatccaaagattttagtcatttacattgatcgtacaaatgatttaatgattaagggaattaatcaaaaacttaatttaaacattgttaaatatgatccagatctattacaatttggtgaaaatgaaaagtatcgtttaatatctaatataacttatgagaacaaagtgcatgtttttgataatgcacgtaaaatttgggttgaaatcaatggtaagagtattaaagaagttgaaaaagatttacttttcatatctaattgtaaactacaattctggataaaacagtaaggattaaaaaaagatataattattcttcagatttctagagtatacaaacaatatgtttaaacagacatttttatatagctaatttattaacattacttgtaactattgaaacgttattttcttcgattaaagattcggcagtttcagctaaatgtttctttggatcttgtttaccaacatacctcgtcttcaattgatcttctgttaatgttttttcttcttgaattctttcaacatattgtttagcaacttttattaatttctttgaaccatctaagttaccacaatcttgatcatcataatttttcaatttaagaccatttgtccattcttttttatgtaaatttaataacatatcagtttccttttcagttttcctataatcaatattaagagaataataacttctatttaatccatgaagtaaagcttgaatagttggtttgtttaaaagaccaacattagaagtagtttgtcttggttcttgacccatcattaaagcttgtgatggaattgatctaaatgcatcgataacaactttacccttaacactttgaattggatctataacaactgcaacagatcttggatttaattgttcaaaactttcttgggtattaacatcaacacttgataaccaacaaccgaaacctggatgtgaatggtaccatccaacaactgtttgatctctacctgtttgtttcaacatctccatcattttagtttggaaaacatcatcaactgcttcgacggaaacacctgtaccactttgaggcattgcaaaaacatcaacaactgtaattgtataatcatctactatttcacctaacattaaacccataacttccataggaacaccggcacgtccatgttttaacattttcaataatgcaagtgatgaaatataaacggtttctgcattatcaatagatggagcttcttgaagtcctggacctcccattccacccatacgtcctcctaataatgattgtaatctctccatttctttgtttctattgctgtgtggtatgtaattaagaaagaaacctaattgaaatcacctataagaacagcttcaatggaagatggtgataaattcgccctcataaaaaaagccagtacgtacaaaaccttagatttaataatcaattttacttcctgcttttcttgaatctccttcttttcagacaatttcaatcagttgagcgatatactcctattgaacaatgtcaattacatttaacttatccaaaaatccaatttatgatcattgttttacatcagatagaacacatgttgcaattactcaaggtaaagatgtattaatttacaatttacaaaatccatccaagccacaattattaacaactttgaaacatcacgacaaaccaattacagcagttgatatctcaattgatggtaaaattgttacatgttcccaagatagaaatgcattagtttggacattacaacctaatggtgaatataaggaaacattggttttattaagaattaatagagctgcaacatgtgctaaatggtcaccaaatggtaaaaaatttgctgttggatcatcagctagagttatatcagtttgttattttgaagaagagaatgattggtggatttcaaaacatattaaaagaccaattaaatcaaccattttatcattagattggcatgaaaataatgttttattagcatccggatcaactgatggacatttaagagttttctcaactttcatcaaaggtgttgatgcaaagccaaatccaagtatttggggtgaaagattaccattccaaacattatgtttagatgttaatttatcatcatggattcaagatgttaaattttcacctgattatcaatttgttgcaggtgttggacatgattcaagtttatttgttgtctatccaggatctggtgaattggaagttagtaaacttgataagattaaaacttctaatttaccatttacatcagttatttttgccaacaattctaaacttatctgtgcaggttatgattgtcatcctattgtctttgagggtaatgcatcacaaggttggaaacatacatattccattgatgatccaaccaaaaagaaggtcaatgcagttgaaaatcaaagtgcacgtaacatgttcagacaaatggatttaaagggttcaactgaacaaaaaagtaataatttactcacaattcatcaaaataccattactcaattaaaaccattccaatacgataacaatggattaattagatttagttcatctggtaatgatggtaaagttgtcatctttgatgtttaaaatttatcaatggaatgattttttgtgtaaatttatttaggtagaagattagaaaaaatattaattaacaattatttagtatacaaaaaatgttgggatatattatataaaaaaagtagtaactgaactattattggttatcattattactttctaattgatcagcaatttgacggtggatgtcaacatcttcatttgataatgagaattcttgattgattctattaacagtttccattgcttcttcatctaagtctacatcttcatcaagattagttttcaatattattattttcaatactatgttgttcatttttagaactttcatttaattgattctttaatgagttacttatttgagatttcgcaaaattagcaatattttcatttacattactactagaattttgttgatcattacttgtctcacttgattccatttgatttgaatcctacttgaagtaacacattatgaacagttgatttgtatacagtacttaatataccgaactgatttttgtagatctgtagaaagttcagtaagattttcaatgtttgtatcactaactgaagaaatttttctattgatatcttcaagtttgtcctttaaagaatttaaattaacagccagagcttgatattcgttcaaaagttgtacttcttcatcagtgagtgaagattttagaaggttgaaatcaaaacttaaaatatcagacattgtccaatggtgattgtctcttaattgctatgttttacggaaagaaatgaaagtaaaaaaaagagagaattgcagaagtaaaattgtaaacatgaaaatggtatgtatggtatataaaaaaatcggagaatctggtgcgaaactctttatttgggattcgaattgggtgtagtgtggctcattctttaactgctattagaaatgtaatgttgatggccaacaacaacacccccaccactagtaaataccccattgatgttctaagtgagtacgtaaaaacacgatgacttttatagttatagatactctgcacataggacagtaatcccacaaagagagacagcatactcaatataacaaatagaattgatactgcataactgaatcttgggaaccatggcggtggatttttcagtttaggtaatttaccaaaattagaactagatgtatctaagcggaaatctgtagcaatggtaacagcaattgcggaaagtgttatggagaatttagcccatgagagagctgttctttcaatcatgagaatatcacggggttcgctggcggtgttatccaccatcatctctgtccccataataatactccttactttcttcaagttgattgacattttttgtctatgtttgtgtttgttaaagggagaagagtgaagtacatggtctgtaaggttacttcatgataagggctatattacataagaaacaatggtaatgcccatataggcaagtcgggcgacacattaaaaaaattgaaatttttcactaagaaaaaattttttaaatcttttatcacttgaattttgattaaattattaagtattagtaagtgataatactgactatcttttctcctttaataaggttatttcagttgattatactctacaaatatgtctaattactccaatatgcatacacatgacggtcaagtcactcaaaaccaacaaaatcaagcaactgttttatgttgtaattgtggtgttccaatggatggttcaacaggtttagttatgtgttacgattgtatcaaattaaatgttgatattactgatggtattccaagagaatcaaacttaagtttctgtagaaattgtgaaagatttttacaacctccaactaattggattaaggcagaattagaatcaagagaattattagctttatgtttgagaaggttaaaaggtttaaataaaattagattaattgatgctgcattcatttggactgaaccccattctagaagaattagagttaaattaacagttcaaggtgaagcatttcaaaatgcaattattcaacaaagttttgaagttgaatatgtggttattgcaatgcaatgtcctgattgtgcaaaatcttataccgctcatacttggaatacatctcttcaaattagacaaaaagttccacataagagaactttcctttacttagaacaattgatcttaaaatataatgcacatgttgatacaatttctattaaagaaaataaagatggtttagatttttattattccaaacaaaattatgcagttaaaatgttagatttcttaaattcaacagttccaataaaatctaaaaaatctgaagaattaatttctgctgatattcattcaggtacatcagtttataaattctcattctctgttgaaattgcaccaatttgtaaagatgatttagttgttttacctgcaaaattagcaaaatcaatgggtaatatatcaagattagttttatgttctaaaatttcaaattctattcaatttattgatccagcaaatttacatatagaagatttacaagcaagtgtttattggcgtcatccatttaattcattagctgatgttacacaattaattgaatttatagttttagatgttgaaccaactggtgaaagaaagggtaaatatttaatggcagatgttacatgtgttagagcaagtgatatgggtggttcatcaaatgaagaattttatattagatcacatttaggtggtcttttacatccaggtgattcagcaatgggttattatattaaaaattctaactttaatagtgatttatatgaagaattagatacaaataatattgctgatgttgttttagttaagaaacattatgtaagatctaataaacgtgcaaagaatagaaactggaaattaaagagaatggcaaatgaaagaaaggatattgttgcaactgaagtcttagattcaagacaagctagacaagaacaagaaagagctgaaaaggattatgaaatgttcttacaagacttagaagaagatgatgaattgagacagaatatcaatttatataaatctgataagattaatcaagttaatgaaggatgatgatgatgaaataagcgaagatgaagatgctccacaaattgatattgatgagttattagatgaattagatgaaatgactttggatggttaaaatcaatataccatttacaatcgacaaatcgaacaaaatgaaaactttacccattcttaccttttttctatataaattaataataataatgtaaataaataactatataagcataatattaagtacaaaccacacaattatttacttgcattaactaatgcagcattaataccttgaggatttgcaccaacgattttatcaacaactttaccatgtttaaaaactaaaaatgttggcatagcagagataccataatcacgagcaatttcactgatttcatcaacatctaatttataaaaatccacattagtatgaacgtcactgaatttttcaagatatggtgcaatcattttacatggaccacaccaagttgcatagaaatcgacgaatgcaattggtgattttaaaactgtatctttaaatgcagctgatgaagtaatttcattaacttgcagtgaagctcttgacgcatgaaacatacgttttgaagataatcttaatgtgttaattagtggttcttgaggcaaacattgtcttgtacttgaaataaagaactaactagaagatatcaaagtatcgattgaagatatttcactattactaatcctgtatcctttccaacagattcatgattaaaagacctgtataaatatcactagaaaaatttagcgacgcatcgactgtttggtattttaacaatgctttgataatgcgtcaaggctcagctgttttgatttataactctttttgccttctccctgttttagatctgaagcaagagatatataggttacactagggcactattaacatgacagggactacgaatgatgaaaggactgatgtatgcagcaccatccagctttgtggattcttctttttttgtggaattatcaagactcaaattaaatgttctaaaattagatacttcttatcaacaaatagttggttattataattacaattcactaagtcagaaccaaaatccagctttaaatttacgtgattctagtttgaaatctattagtgatcttacggaagtactacccgaaacactcttattttttatcaaatggtaagttattgaatgtaaactcaattgaagaatttaaaaacttaaacaagaaagatttgttaactgaatcagctatgacaatattcaatggaatcaaggataaatcattttctatctaatcctcaattattatctagctttactatacttatcatattgtgatttgaaaaaatactccttctattattggtttgcattcccacaatttcaatccaattggctcaaaattgatatgtcacattctataaattacagatttgatagatcacaaagctttacagaacaattctatattctcaatgaaactgatgatgaactaatacccatttcaaaacttcttgactactcttcaactgataaatgtaaaattttatttgttgatacttgctcacttgagtatactgtatcattcatattaagaaatttcctatttgcattatcatactataatttcaaaaatgttgagtttcaagtattgaaagtaaatcatccaagttttaactttacaatcaaccttgaaaatgaagattataattcaggaatttttgataatccatcttacattccgccaatatcaggatgggagagaacttcacgtggtaaattagggaccaaaagttgcagacttaggcgcattgattgatccattacaattagcaaatcaagctattgatttaaatcttcaattgatgaaatggagacttgtaccagaattaaatcttttgagtgtgaaaaattcaaaagtactcatattaggctcaggaactttaggttcctatattggaagatgtttattagcttggggtgttaggaagataacatttgttgataatggtaaagtttcattcagtaaccccgtcagacaaccattgtacaattatgaagactgtttaaacggaggctcgtcaaaggctgaaacagctgcagttaatatgaagaaaatctttccacttgttgatgcaacaggacattcattacatattcccatgattggacatccaataaaggatgaagaaaaagaattcaatgattataataaacttcttaaactctatgaagaacatgatgcagtatttctatgtttagattcaagagaagcaagatggttgcctactttattaggcaatgcaatggataagatagtcattaattcagcattaggatttgaaagttatcttgtgatgagacatggatgtattgattcaaaaaagggtataaacgagcaagttgatggaaggttagggttgctatttttgtaatgatatagttgctcctaagaattcaatgaccgatagaacattagatcaaatgtgtacagtcacaagacctggtgttcgcattaatggcttccgtcattggctactgaattgtttgtttccatattacagacacctaatgggaattattcaaaacatatagtcaatgatagatcgaatatattaggatcattgcctcatcagataagaggatttttacataattttgaaatactgaaagttagctctgacaactttaaatactgtactgcgtgctcaggttaaggttgttgaagagtttcataattctggttgggaatttattaaaaaatcattaaactgaagaaacatatcttgaaaatcttacaggtttgaaggctttccatgaaagagctgaggaagcagcttttataatggatgattacgatgatgaatctggactcgaagataatattgattaatttcaacattttttgaagtttcactcttttttttaagtagtatgttacatttattaaagcaaataaaaatgttaatttatattttgtttcagtaattttttgaaacgatatgagaaaaactattatgacattaacatttcaacagcccaattaacacttaatgttcttatatctgtatatgtttgtcctgtaccaacaaataaaataggtatacctgttgcaaaaaccatattaaccatagaacctatcaaatcaccaactgtatcacatttagagataataaagaaatctaaatgtctatttgcaccaaaagccttattaaaattttgtgcttgtaaaacagaatcagtccctactaaagcttcaccgaccataataattttatctggattagcagctttagcaaatgatgctaaaggtgccatcaaatgagaatcattatgtcttctacctgcagtatccattaaaacaacatcgaatttattttctttagcatatttaattgcacctgttgcaatcttagcaactaaatcagcaccaccataacctgattcaaataattcaatttgctttttatttggtgataattgaaccaaattattaacatgagtacgtaattgttcaacagcacctgaacggaaagtatcacatgctgcaactaaaactctataatcattttgtagtaaccaaaatgctaatttggataaattggtggatttaccaacaccgttgacaccaacaacggaaatacagtaagggccttgactgtttgccttcttttcttgaatttcgtgtaataagtcaatagatgaatccggggtaagtaatttctttaattgtttagctaaagatttctttgcggtttcctcaattgatgtaaaggattcggtagtttgaccaattaaatctttttcaacttctgatattaatgaagtggcaacattaggagaaacgttcttttttattaaatgttgaatcattgattgcttgatttcagtaacatcttcctttgtaattttcttaccaccaatatattttttcaaaaatccaaaagcagaggaagtcatagaacttgattgcttttctttttcaattgttttctttttagatgataagataatcttgttcatttcatcagatagatcattaactagaaatccgtcagtagttttggtaccaaaagttgatttatcaccaagtagttgatttatatttgagcttgtttgctttgaatttgattctgtatttgatgaagagaaatcaagagtagattcatccttgccatcatcctcgtaaaatgtcccatcagtattccattttctggactttttagctttactggacgcacttttgcttgctttacttttattagtagtagaagtatctttattgtttgtatttcgattttcgaacttcttgaactggttctggttgttttgattcatttaatgtagaaatatcacttactttcaagttgaagaacttttcaaacttatctaaatctgcagaagtattttcgtataaaattttaatatttttcaaaaatggatatggatcttttaccgttattaaagatgaatataccattgtgaagaaaactctattctttgatttttcatcagtccatattaaatattttagattgtatccatcaattgagtaactacctaatgtagcatcagaatcggaatatttcaaaatatcttcactatcttggtttttaactaatgaacgttttttactaccagatttttcatccccatcaaaatccttttcatcgtcatctaattcatcatcttcatcatctaattcctcattataatcagaaatataatcatctgcagcattggcagctaaattttcagcctctaatgctgcattagcttcactttctttattagaacctgataagaattcagatccttccacatatttcatttttctttcattaatcaacacgtcattgataaaggaatttaccacacgtgaataatttttacctggttgatggttaaaatgcacagtaccagatggatcaaagatcaaaaactggtcaatcatttttgtctatgtaactaagtagctgacttagagagtttgtcgcaaaaagaaactaaacgaaaccactatcatccattgaatcagaacagcgatgataaaagaaagtcaacatgattttcagtttcaccaaatttccatttttcaggctgtgcgggtttttattttaatcaaaaaattttaactagtaaaaaataattttacaacttaaataacagcataattactcttttctggttgtgatattaaggtttacatctcaagtaaagctttattgacaagaaatagctatataatttattttgaataattagaatatttaagaaaaatgtcaacattcaaagatttgggattaccaaaatggttatgtgagactttagcaggtgtcaaaattacaaaaccaactaacattcaagctggaacaataccacagattcttaaaggtaagagttgtattggtggtgctaagacaggttctggtaaaactatttcatttgccgcaccgatgttagctaaatgggcagaagatccatgtggtatttatggtgtcattttaactccaactagagaattagcaatgcaaatagctgaacaatttagtgcgatgggttcaaatgttaatcttaaaacagcccttattattggtggtcaaagtatgattgaacaaagtaacatgttaaaaaataatcctgattttgttattgcaactccaggtagattagcacatataattgaggaacatcctgatgatgtgaaaggcttgaaaagagtgaaatttgtagtattggatgaagctgatagactattaacagaatcatttacggagcatttgggctattgtttgaaatctttacctgatggtaaaaagagacaaaccttacttttcacagctactgttacagatgctgttagatccttgaaggataagaatgaaaatgttttcgtttatgaattggacaaaatagatgatgttttgattccctgaaagattaaatctttcttatattttaactccgtatcttgttaaagaagcaattttacaccatttacttacgattggtgattacaaggaatcaactgttatgatttttgttaatagatcagaaacttgtgaattgataaaaagaattttaaaagatcttaatgttcgagtcacttcattacattcagaaatgccacaatctgagagaactaattctcttcatagatttagagcaggtgcagctcgtgttttagtttcaacagatttgggtggtagaggtttagatattccatctgttgaattggtaataaattatgatattccaagagatcctgatgatttcattcatagagttggtagaactgctagagctggtagacaaggtgatgcgttatcatttgttactcctaatgatttagatagattattagcaattgaagatagaattggtcgtaagatgaatgaatatgagaaggttactgataatgaaattatcaaagattcattgaaggtaacatttgcagcaaaggttgatgcaagaatggaaatggataaagaaaattttggagaacgtaaacaaaaacttagagagaaaatggcaaagagagcaggaaatactgttgcaaatggtaaagtatcaaagataaagcctaaatcaaagtccaaatcgggatccaacaaataatggatagtttctatgttaaaatttttgtataaatacccaattggtaagtaataactaaacatttaatagatagatatacatgcttgaaatgatgtacatggttagttgtgattaatatcttgcgaaaagtcaaaatttattttatttaaagtattatgaataactactatacagattagaaaagaactaaaagaaaatttgaaaggcaaagatcatctcaaacaattcttacccatcttttgtctatcaatatgagctctaagaaccttttgtctatcacgtaaactcatctttctcttaccttgaactgcctttttatgaatcatcataacaaaattcttctttctttccttttctctattagtagttgaacgctcattttctctcttaccctttcttgaaccaaatttctctctatcttctctaccttccttaatagatgccattctttcttccttattcatcttacgtctatcaacattaactaaatcagttgaatcaacttcatcttcattacgtaatttatgaccagtgacagtttcaatacctgcttcagcagttaattccttcagtttagcaaaatcagcaggagttaaaacatggtttaaggtttctctaattgcctttaattcctcttccttggctttttccttctctaattgtttctttgattttttggtagttccattaccttcatcatcagataattccaagtcagaatcttcaccatcatctttacttatcttacgtctcttatgttgtttcatatatttcaaatacttcttcttaataccatttctttccttcggtaattcttcatcatcttcatcatcttcatcaaagtttaattcagtatctgatttaatatcaacccaatcaccttcgacttcgtcatcatcttcttcttcatcttcagattctggtaagttccaatcttcttcaccttctttaccaagtaaaccttgttctaatttccacttagctaataattctaaacctggaataccattagtgttatccttttcaataccaaattgtggtaattccttagaaccattatgaattaaattcattgttgcaaccttacctctatcagcctttgctaacatttcaggtgcaacttctctatataatgaaattaaagatcttgcagccatcataacagctttactctttgaacctttataagcaactaaatcttgtaataaatcttcatcaataccagaaggatttcttgctaaaatttctcttgtagtatttaaaccagcagatgcaacttctgctgcaacaccatcactgacaaattcatcagcaattttacgtaccatcatattaattgattctggtgggactaaatcatgagtggcttgagctgcagctgctaaaatttgtgtaacatttctttgttttggtgttaaatatttcaaaaaaaatgaatataaacctaaaacagttaatttatgtgtaccaactaatcttgagactaaattcataattgcaattctttcatctaaatcgaatttgtttgcatttttaccagacaaatgactttcaaacatttcctccgcaaattgttgtggatctcttaaaagatgaatagcactgaaatttaagtaagttgcagaatgttttgaagaatttttctttttcaaagttttaatagcagattctaattttttacttctctttgaatttttcttattaacttgcattttatgtcttagagcatcaggatcaatatcttcatcatcagaattttcttcaaatgctgcatctctttccttatcagcacctaagaagaatttaacaccagaaacaacgactttattgtcaggatgtaaacaagcttgagtcattaactcaacagttcttgaatcatcccaaatacctcttctccataattctcttgtaagtttagttgcccatataccattaccatccttttgatctaaaagattgaataataaagcttgagttgttctatttaatttttgattttttgcaccagtattacatgatttaagtaatgaaactaaagcggtataaatttgttttcttaaagattttgaatgatattcagaaccatttgcaacatttgaagtatatgaaaataataatgggaaaagagttttaattaatgattcagctgtaatgatttctttatttctaagcataacgagacattgaacaattttttctcttagttcatgatcaagttctgcatgatttttagttaaaatagttgctaattcatctgggaattttgcagtttcctttggatatgatgaacagacaaaggacatgaaattgatgacttctgcaaattcttcactgtcttcagttgatggatttaacaagaaaatatctctcattgattcatagtgtgaatattgttgtaaaaattcttcatgataagattctggatctcttctaaccaaattttgtaataatgcaaaattggttggtaagattgctgctcttcttctcttaaccatttcttagtatactgatagattgatttagcagttaaactgtgattaaaataaagaacccaatgatatattgaatatcgataatacaatagattactttaagaaaataaattttttttacctgtaaagtgaaaaagtgaaaaaaaaatttcctctcagaaaaaaaggaaagctttttgtggcgcggtacttgtaaagtgtgtggcgcatggtgttgacatttttacatgaatttgcacctttttccaatacaatagtaaaacacgaaataatgttatttcaaattctttagagataccatttcttttgggtttttcagttaaactggggactgtatttcattatgtctaaagtgtatgagataagcttaaatgaatccaatcttggacagtttgtgtttgggaatttcactcataaaacatacctctcaagcaatgttaataacaataataaaataaaggcatttaaggatatatcttcaacaaaggaaaaagaagacgcattagttgatgatttgttgaatgttctagatacaagagagggtaaatacattaaatttgggcgaggcttggatttgaatgatacacagacgtgtttaaacggtatagactttgaaattgatgttgatgttgatatttattacaaagaaatagcaactcaaattacattattatctaaaaaaatatcttcacttgcctatttttaccgatattttaataaatcatgttatggcagtgtattgagtaagttatgtgagtatataaggaagtttttgaatcaacacagattaatgctatgtcaattacgtgaatcaaaaatttcacttattatgctatctcaacgaataaataatcatccctttgatgatagctatggaactccttttcaatgtataacacatctctatgatctaactcgtcatatagttaatgaaaattataaaaggttacaagaatcaaatagaatagacatgcaattcgaaaatattatgaactctttgaaagaggatttaaactctaaattattaaatgatattgttatagattccacaaattcaaaatacatcaatggtgggatcgttctaaatttcctacattttgaaatacagcaatatagaggtaatgaaaagtcaacacgatttctaaaagatttataccatctcattagtactgactatttgacaattttaaatgattggctaagatatgggaaaatttttgatgaattcgatgaatttttcatatcagaagagaagaatcatacttatatctataatgcttattattggatcaataaatttgcaataaagagggaatcgttactttcacaattcaaatcaggtgagtttcagaaaaaaatattcctaacaggtaaatacttagcaattcttaatgaatgtgaatgctctaatttagtaagaatttctccctatgaaaatatagtttcactaaatagtataactttagaatcacaaattgataaagcatataaaagatccaatgaattatttgttggagttttcttgaacaattatcaacttccaggatttttgcatcaactaaataagtattttcttctgacagatgccagctattttaataacttcctaaatttatctaaccatgatctcaaaagaagtttcaatgcaaagttgatgcccgaaatcaaaaaaaaatatcttctctcctataaaagtgaaagtaatgatataacggatacaattatatcacaattactcaatgttaaatttgaaactaaaccaattttagatgatatattagaaatcgttaaaacacatgcagccgactcaaataaaattttaaatgcttcaaatctaggatcattaactgaattattagaagagaatgctaaaatgaactctaatatgatatcctcaaatgaatcagaattaaaaagatgcaatagactgacagttagccattttaatatagaacttgagataccttttcccctaaatcaattaatcatagactctcaaaagctggaatatcaattgatcttcagacattctacgcttctgaaatttttagaaaaaagatttgaaaaatcttggagagaaattggttatcatacattctggacatggggatttgaggatagaaaagtctcaaaatggataagaaaatgtagatactctcattccaaaatgtttgattttttgaaaatatattcctatcatttaaaagaagatgttttagaaagtaattgggcaaatgttgaatcaacattaaagggaggacttgagaataacgaaaaatttgattttattgatttcaagtctcaacttacagaatttttgagctcttcattaagtgatatgttattatcacaaatcaatgttgctaattgtttgtatgaaatattcagtttaatttttatgtttcacgaatatgttttatcattaagaaaaaatttactgctgattgatgaaggtttgttagatttacatagagaaagactgaatttatcattcagttatagtcatgatgataaagaaaaaagatttggagacatgactcaaattttactatcttatgatgaaatgtttagtcataaattacgtgaattatgtggatatttaagttattatggagaaatcgattctcctaaaatgttactgcttcataataaattagtttcatcctttaatatccaatcataaatatatttttataaatttctatatatacatacatcaccaaatagtatttggatcgctgttcattagtaatgtttttcattaaatcttatcatatctaccagagcattccgccattaaatctatcactgtctcgatattttccttattcatacctgaacatggaacacatttccagttcttagcatctacaaaagatcttaattctataaacttttgttgtgaattctctaaatctgcctttgtagcaacaactaaaacatttttacctgataatctttcctctcctaattcatcaattaaaacattcatatcatcaattggattttctgatccaagagaaacaacaaatacaagaccacctgatctttcaatatgacgtaaaaagtttaatcccatacctttattgtattttgcatctttaacaatacctgggatatctgcaactgtaaatggtggttgatctatacgtaattgaatagtaccaatcgttggttgtaaagttgtaaatttccagtgtccaactctaggtcttgcattagagattgctcttaataaagtagatttaccagcatttggtaaaccaactaaacctaaatcagctaaaagttttaattcaaaaataaaattttcttcaatacctgctctaccttgctttgcaaatcttggatttctgatagttgtcgtttggaaatgcatgttacccattccaccatgaccaccttttaataataatattggttcttcagttggtttgtctaaatctaaaccatcaataggaaaggtatcattagttaattcatcctctctcttttgaagatcataatttgtaactctttcatttaattcattaaaataatctctctcaagatgataagcttcatttttttccttaaatatccaacctctaccagcttcataagattttctgaaaaactgaatgaattttggtaatatagatccaaattcatctgattttgccttaacatggaaaactttgtcatcatattcattcttctgtaactctcgaatatcttttggatcaggacaccattttatatgtgtaccaacaggaacattaatgtaaatactatcacccattttaccatctaattgtccgtttctaccatttgatccatcaggtgcaatataccgtgatctaagattatgtaatgaacttataccttcaactgccatgacatatatatcaccaccatcaccaccatcaccaccatcaggtggaccagatgagatacctgtatctctgaaaaaggagacatcaccattacctccagcacctgcttttaatttaacgactcttaaatctgagaatgcttgtatggattctgccttcggtcttttctttgcattcaatgaagaaaatggagatgatgagacaaaatagtcggatgcaggaatagaaactgtatgatatgttttttcattttcaattgttggtgattcaacaactgtatgaattcttttagtcttttttgatttaaatttcacaaaattttcattttttatttcatcttcaagatcggacttatcaacaatttcatatgtaacttctgcttcttctttaacttctattttagttttctgcttttctaaactttccaaccatgtattattttcttgcacggtaggtgcattatcaggaactggaggaatagtggaatattttaaatgagatacattgatttgatgatctaaaattttccgacataaaattctatttatcgttctatactgtagcatgctcgactgttgtattggatatttggatatctgttagtccttgatagaaaataaagttgaaaagtttaggtttctttttatttctaatgaaattttatgaacaacaaaaaaaatgttgtagtgaaaaattctcaattcatgttgtacaacaaaaagcgtgtcacatgaatataacataattataaaaaacagtgcttttataggactttgaaaagtataacatagctttcaaagcctaattcagtaaagaagcatctcttaaatgaacactattaccttttctaagaaatcaaacaaaagaatggtgaattaaaagcaaaaaacaaaaatgacgagccacctaaaaagtaaaaaatgccaatttcagaagttttacatgttggtttaagatttacagtcaaataaagttttatgagacacctcactaattttgataatatgagataaagtaagacaattagaatattttaaaagcaaagttagagtttagagtaaatttatataaattcttactatattagttacaaaggtattaattattttttgtaagttgaaagatattcttcataaccttcagattcaagtttttcagctttacctaaaacttcatcttccattgaattcatatatttttccatttcagtaatccatttaaaatcaaatgcacctaatattctaattgctaataaagcagcatttgtagcattattaattgcaacagttgcaacaggtatacctcttggcatttgaacaattgaatgtaatgaatcaacaccatctaatgttgaacctttaacagggacaccaataacaggtaatggagtcattgcagcaaccataccaggtaaatgagctgcaccacctgcacctgcaattatacattttaaacctctctttggagcatcaattgcatatttagccattctttgaggagttctatgagctgaaacaattgtaacttcaaatgggacaccaaattttttcaaaatattacaacctgctgacataacaggtaaatcagaatctgaacccattataacaccaactaatggagtttttgaagtacctggaattaatgattcatcctctttattttcaatttcagtattttgaccttcaataaatgcaagtctacgttcacaatcattcattgaacctgagacaatatttatatgacccatttttctatttggtctagttgatttaccatataaataaactgaagcattcggtatatttaaagctcttttacataattcaatttcaccatttggttcatcaaaacctaaaacattaagcatgatagaattagtttgaggagttgagaaacaagtaaaattctttggcattggtaaaccagtgattgatcttatatgagcttcaaattgggatgtaacacatgcatcaattgtataatgacctgaattatgaggtcttggagcaatttcattaactaaaagttcaccatttggtaataagaacatttcaacaccaaatataccagcacctgaaaatgttgaaactgcctttttagctaaaatttgtgccttttcttgaattgtatcattaactctagcaggagcgtaaacagtatgacaaatattatttctatgtatagtttcaacagttggataagagtaaacttcattttctggatttctaacaaccataactgcaagttcttttacaaatggagcccatttttcagcatataaaggtctatcagctaaaacttttaaagcttcagggataaatgatttatccttaacaacataattacctctaccatcatatgctaaagttttagatttaagcatgaaagggtaaccaaattttgaaccaatatcctctaatgctaattcagtactttcaacacttaaagattcagcaactgcaacattataatcaattaaatgttccttttgacgatatttatccttaataatttctaaagtttcaggagatggataaattttaataccagtttccttttgaattaattttaaagcatcagtatcaacatgttcaatttcaactgttaaaatatcacatttatttgctaattttctaatatcatctatattattaaatgaaccatctaaatgttcaccatttgcattaatttgctttgccggagatgaatcaccagattcaaggataacagttttaatatttaatctacttgcagcttcaacaagcatacggcctaattgaccaccaccaagaataccaattgtttgagagtccattttttgtcagtttctgttgtgttcagatagaactagacagttaattataattagagaaaatgtctgattaatggtgtatattaatatattccagtaatagaaattcatgttaaacatgtaataatatttctaggataacttttttgattaagtaaaaattgactctggcctgtattatctaatcaataataataataatactaataattataatgataatgattagataagcaactatgcattacgtaattatgtcatagctaaaatgatgacataaccataattcggatgatgaggataagtgagaagtctatagtactttgaagaagataagtgataacaccactgtattgatgaattaatgatttccagcattatcgtaaaattaaaaacatttcaatccgctccctttgctcaacaaagaagattgaataatatatatattatacgaaaccaaaagaattcaaagcagtataatatagatcttccgttaaagttgaaagttactacgagagcattctaaagtcaattttattccaatagataagccacctaaaaacaaataaacaaataaacaaacaaataaacaaataaacaaattattattatgctttgaataccgtgtttatagttgcaaaattattattatattttactgatgacttaatgagggattatgtttaaatccgcgatttgaaatactaagtctgggtgatcggcccggagataatgttaattcccgttagttagtgggacaagatctattattttattcaattaaggtttagatcttcataatcatcatgttttatgaccccatcaaattttgttcctcttcttttcttttctttaccattaatcctcttatttcgtatatagtttttttgggcttattctcaggtcttgagggattaattagcgggaattttgttaaaccgtttgtaaagtgacactcagtttttttatttgagtaaaagtaactaaattttacctaaacactaacgatttacagtaaacaaataaaaactatttacactgattcttatatattttgtattcaaataatttaattaccttagttacgattaatattgtttgacattctgaactataaattacactatttaacaatacaataactataacaattactagtatatacctcatcaaattcaaattaatgagctaaacaagaggactaaaatgttcccgatttcagattttcttagaaattgttaaaaaactgcacccaaattaatgcgcccaaaaaagcattgaaatttgtaaaagaattatttattcaaccttgttgagatatatgattataagattaagtaatcataaacatttcgtcgaagatttcgtcgacaacaattaaaattattcaacgttgaaatacgtttcgtattttaagtatataacttatttacttttgttcttcttaggagaacatccgggcttatatattatttatatattaaaacgcttattattattacaattaaactttatctagttattattattaaagatgtctaattactctaaaatggaagttgatacaacatttgagatgttaactcaaatgcttacctctggtgaaattaattcaagtgacattaaaggtgaccctgaggtcttaaaacataaattggaatccaaattcaaggaaagaggttttgactattcgtctgattcttatgtaatccagtcaagaaacgatataaccactctcgcttccgaatatggcgaccagagtgaggagctgatcaaactggcttctcacaagatgataaagaacaaagctactcgtgatattgatcttaccaagtacgaatttgtcgattcggagtcctcttgtaaattacacagagaagatccatgtatgtgcagaattccaaaagaaatcaatgattcaattcctttcattacaacattgaatcaaccatcggaattcggtaactggatgagggaaatcaataggttattaggtggtgttaaattcactgaaatcgttgttcaagcatttaaattagttggtaacaagttcaccgatcttcaacaataccacggttgtagaacttttgatggtactatcattagtgtcattgtcaaaaccgtatccaagcaaatcgctaatcatgttgaagctaagattaaaactaatcgtaacagtgtccatgttatcgcaagaattttagaaaaattgaagattccggtcgataataccatgatgcatttcaaattaaatgaaatcaatgctaacgattgtgatatcgttaggattaaacaaactattgaatcaatccttgttggtttagaaatttctcatattccatttaatgaaaaagttgcgtgtgaaattatcatcgattctggcaagctacctcaacattttattaccacatggagatcaaataaggaagatcaaaccttatctcacctttaccattcgattgaacaattgattgtcgatattaacagggttgagaaaactaaaggtttaaaacaactcaataatatcaatcaccataatgaaaatgatgacaaacatggaaattatgttagatctaagtactgcagatattgcagacttaaatcccacaacacaagagattgcagaagacttaaggctaaaaatgaagcaaaaggtgaatcaaatgaaacacctgcagcgaaacctgttgcaactcttgaatcaaataacaacaaaaatgaatcttcaaataaagaagaaccaggtaaaccagcaagaaaaggcagatttatcggttctatcaacctcaccaaattggccaaaagcttaaataatatagaccgtaacgaaaacattaaatcaagaaatagagttatcattgatactggtgctgaaacatctgcattttgcaatacaaatttgttcaccacattagaaagatatgaaatcccagagattttagttgcggcaaatggcacacctattcatgtgtttggtgaaggtactttcgagctagaaattgaagacaagatttatacaattgatgcagttttcacaccattaattgacgcaaatttactaagtttagatcaaattgatgaacttggcttaaccgctaaaacattcccaaaggaaaagatgatatacattggtcatgaaaataatattaaaaagggtatcaaatttgtcaaggatggttctttatggttctataaaaacggtgtattagatgataactgcgataaatcatcatatctcaatgacgcgagcaatcgtatcaaccaaatatcatattaataatgttaattcatctaatattactgtatctgaaattttatcaagaggtgaatcaaatttagataatcccgagttggaacaaccaacaacagatactgatggaaagaattggcataaaattttaggacattctggacctgcaatagttaaatcatatggaaaacatggtgacaaaaattgtcaatgtatggattgtatgcaagcaaatttacaaagtcacaaagcttataaaggaagtacagaaaaatataaaattgaaatacctttttacaaagtacatgcagatttatgtattattcaaaatggaaaaggtaaatcttatgggaataccactagaaatttattagttatgttagatgattttacaaattatattcacatagatttccctatgaagaagaatgaaacaggtaaaaagattgctcacttcatagcctttgtacaacaattttttgaacaaaaattgaaattattatctacagataaaggaaaagaattcaccggtggtgatacattagaaattttattacaaaacggtaccagattatgtacaacctcaggttactcatcaaaaagcaatgggaaagttgaaaaattaaatcaagatatattaagaaaagttcgtccaatgttaatatcatcaaaactcacattagatttctgggaatatgcatgtatgcatgcagttgaaattatgaataggagaccattcgaacatttagatcaaaaatcaccattgtattacttaatggaaacaatcggtgctgaaaatgaagtaattgatattccaccatatgaattcggtgatcttgttatggtaaaaattccagctattggaaaattaggtgatagaagtattcaaggtgcttatcttggaattagcagatcagtattaggaggttattcagtttgggttccaactaaattagatgatattcagaatgctgaatatttaaaaggttttggacgtattatcgatacgaaagacgtccaatttttagataataatatgaaatttatggattggttatttagcaagattgagcataaaccatttacagattattctaattttgatatcgaatctacaggtttatttaatgaagaaaataatgatgataattatgaagaagttgataatcaacttaaagagctgaataacaaagtcgaagaaacatcaaataaaaccaataacaaatcaaatgaacaaccaaacattattattcacaaccacatacattctaacgatcctcaaaagtcaaacataaatacatcaaatgtccatcacacatatcaatcaataccagatatcgattaccataatgacaatgttttaccaaaacaatttaattctgcttataatttaggtggtgcatttatgaataatgcaaacttaggtggtgcaaacttaggtggtgcaaacttaggtggtgataatgaaattaatcaaaatacaagttccattaatttaggtggtgatatacttaatgatttagatattaataataatattaatagaacagaaaaatcattctttgaaagtactgaatcatcaattgaaatattagcaaataatattaataatattgaatcaaaaattgaagatatcaagttaaaggtaaatgatatggaactcgatgaagtatctaataatacaaaagagttacaagaattaagaggtgaattagttaatttagcaaaagaatataagtattccttaaaacaatttgatgaaaaatataataaatataataatgaattatacaataaaattggtgaaaatcaaaataaaatattagagcaactcaataatacagatcgtaatgatgataatgatataataaatcaaatcaataatgaaattgaaaagaataaccttgaaatcattaataaattaaaagaatccatggatttcaataaaaatattcaaaattcaatagatttacaaaatcaaaatatatatattcaaatgaaagaacaaaatgcaaaatttaatgaaaaattagatgctttagatacattaaaagaaaatataaatgaattagctaataaaattaataatattactgacaataaatccagtaatacagaaaataataatgaagttgcaagcatcaacaattctataatagatttaaccatgaatgacaacacgatcatatcatcaaatgagaaaaataaacaatctgaagttgagaacgcattaaatgaaatattaggatttgattatgaaaacaaagaaaataaactagttgtaagacaacaagataactttgatgatcaattagcatatgtacaagatgatgaccatcagtatgataattataaaatggatgaaaccgaacttattaaacaactagatgaaataatggaagtaaatcaaaataaccagatggttttatattcagaaaatgataaatcaactcctttagaaaagaaagaattcaaagttgttaaaccttacaatttaagatcaaataataaaataaaatccaaaaataatcctaatgtcaaatataaaaattatagagatcttatcaaagaccaacatatctatcacattagtttagacggtttaaaatcattacaagataattatgttaaaaatatacaaactaaagatctggtatttatcattgatatcaacattgaaaatgataaattgttcaaaaatgtctatcacattaacaacattagtattaataaagctttaaaatctaatgacaatcaaaaatggattgatgctatgaagaaagagtataataatttaatatcacacgatacttgggaattagaaccaactgaaattattgcatatgatgaaagaagaaaaattgtgaaaacaatgtgggtattaaccatcaaaagggatttaacatataaagctagactagttgcaagaggtgatactcaaccagatgatacttacaatgaaacatatgcttctacattatcttacgaatcattaagaattattttatctgaatgcatacaattaggatttgaaattgaaatgatggatatttccaatgcttatgttaatgctgatatcgatacaactatttacattcaattaccaccagatacaccatttattaatgttaagaattatgatggccataaaatgtatgggcataagttattaaaatctctatacggattaaaacaatcaggaagaaactggcaattattattggaaaagaaacttaaatcatttggtttcgaaaaatggtcagatgtagattgtatcatgagaaaaaggaatgctgaaggaatgaccactgcaattgttggttattttgtggatgatttaatcattggtggaaatagaaaagaagtgaataaaataatgaatgatataaaatcaaattttaaatgtactactactgaaatcgatgatgaagggtatagaaatatcttgggtatagacatcaaaattaatgatggctacattgaattaaaccaaaccaagtatattgatgcattgtctgaaaggtttaatatcaaacctaaagaatatgtaactccacttcatgaaggtttttattttaatcctttcaataaagatttagaattaggaatttcagaattgaacaataggatcaaatggatgagacaagccattggtgccttactattcgttgcaggtgcaactagaccagatatacaatatgcagttaactacttggcaagattcgttctcacccctcatgatgaaattataaacgaaacggagagaattataaaatatttattaagcacaaaatatttgaagatattttattacaaagattcagataaaagtttggtaggttacagtgatgcagatcattctggagacaaaagtgattttatttcagtaaaaggttcaattttcatttacggtgatgggccaatttcatggagaagtaaaaagggcagagtgtgccaaagttctactgattcagaaataaatgcattcatccaaacttgtaacatggcggtaaaattaagaagaattttaaaatttatctatggttatgaacatgaagagaacgatttagaaccaacactcttatactgtgacaataacagtgcactaagaatggttgttacaggtaacgtatccaacgccacaaactatctcacacaagatgcatatattgcatatcaatattttgaaaacggtgttattgatccaaagaaaattgagacaaaattcaatttagctgacatcttaacaaaaccagttaagggtccaacaatgaaattcatcagggacatgatcctccaataatttattttactattatcaattatgaaacttcaaccacgactacatgtatatgatgaggtggtgtgttgagatatatgattataagattaagtaatcataaacatttcgtcgaagatttcgtcgacaacaattaaaattattcaacgttgaaatacgtttcgtattttaagtatataacttatttacttttgttcttcttaggagaacatccgggcttatatattatttatatattaaaacgcttattattattacaattaaactttatctagttattattattaaagatgtctaattactctaaaatggaagttgatacaacatttgagatgttaactcaaatgcttacctctggtgaaattaattcaagtgacattaaaggtgaccctgaggtcttaaaacataaattggaatccaaattcaaggaaagaggttttgactattcgtctgattcttatgtaatccagtcaagaaacgatataaccactctcgcttccgaataaacctgcatgcatttttttaatgtttttcgttacttatcttttatcattttttaaactttctttgtcctttcccctttctaattattgtctttaattttgtgtctcctaatcttgaagtgttagttactatgaactcccataattacttgtttttgttagttctcttttcgagatttgaaaaaaagtgggggacctgaaataccgagatttttctcgtgaataaacattttcattactttcttaccaagatcaaaatcttggatgttattcctattattaaactttgaatctgagttgaaattgttagaaaagtttatttttggtgaagaaattattatatcatctctagacaattggctttagctttttaatccaatcgtgtttacactttttactaattctaactaaaaaatgacggaaactatcaaataatcgaacaaatttaaactttgaaaaggatatttttattggattgtaaacattgaaacatattctaaaagtgtaaacatttgtatgctattaaattgttatactttagatgtttaaaagcagaccatttccctctgttacatatatgattccttttcactgcaattattctatttatctattttttggttaaatttaaaattattttatttaagacaaaaaacccattcgcttttatgtgggaataacactaaagtaaattacgtaaacacactataagtttactatgtgttcggcgctaccgcgcctcactttaaattgcagaactgcagaactttttgccactttattgcctaatttggcaaaagtctcaatttgagactctattacataatcaacattatctcaactttcccccaacggggggaaaaaaatttgtattacttaattaaacgtcattttaagacctatctaatgatatctttatttcatttaattcattacatttaacctatttaatctctactttaaatcaacacattgatataattcatctacttttcaaatgaacactttactactatattcgctacttgaaatttaattacaatttaccttctaaaagggcatttcactacttttgggacttctacaagtgcatttgaataattacatgcacttctggaatcctatttttttaataaaatgatcttctatgaaagcatttcagtactttccgttcccgatggatatctgattattgaaatgcccttcagggagaactttttctaaattcatcactcaaatgcacttcagaaagggcatttaattattcatgttggttgacatacacttttgaatttgtgtgagattctttgatgcacaaagcaagtctatccatcttctttttatcttcttcaatatccagaaattaatactaaaattactgtcaataagagtgtcaatcatactgtcaacttacaacaacttcttagttagttccaatggtaattaattatacaaagaattgtgttactttcaactatagatagaggaatgatccaaacatgtcatcaaagaatatatttgttatcatcaatgcccagtccccaatctccaatcttttttacaatcatcattacccaacccccaatccccaaaatatacttcaccaaccccaatccccaaaatatacttccccaataaacttccccaataaacttcactaatatacttcacatatacttcaccaatatacttcaccaatataattcactaatataattcactaatataattcactaatataattcactaatataattcactaatatatacttcactagtgtatccatgatgttaatcaaaatgccaatttggaacaacatttgaacttagatagttccagtacattaattatactatgagttttggtactttcaccacattcaccagacccaccaacgcagactttaccatcatacattcaccaatattcttcattcttcatcatcaacatattcacaaaaatatagttacatggccacaaatactctgttctacttttatgtatctatttgaatttattagattgtcacaaatactgttaacaaagaattgatgctgatatatcacccctttttcttcaatcagttaaaaaaaaactgaaagattgcactttctttgtctttatacataataaattcaaaaaagaagaaaacaatgtttaattcaatataattgctgggatttcaactctctaatcctctaacttaacggtcaataatatttctttcatatactttataccaggttttgtatctctttgttattgtgtatatataataaataatgtgaaaacttaatcaaactcaattcctatgatccttcttttttaagaatgtctacttacaaaagattactttactgtttaaatgctatcacagaagggcattttacgtaaatgagtttcaaaaaaagcaccacactaaaaaaatgatatttcacaatagtatttggataaagagttgccccgccaaaagtgcataatgctaaaaacgacttccagaagagcataatattggttaaatgacattcctgaagggcatttcagtatttaaatgagaatggcatttgagtatcaaaatgataagctaaaataacattttttcgctcatattcactttcggaggtgcatttcactccgaaaatgcacttgacaaaatttgccatggggcaatgattatatgagtattcaaatgcttttcaccaagggcatttcattactactatgtacttcacggagtgaagttgacttttacaagtgcattttattgaaaatattcactccctaacaaatttattttaatatatcttggttaattaatgagtttttggtataaaaacttcatataaaatatattacattgttaatattagttatatctaacttttaaattacttatttacccttaattactattaaaatatataattataactaatttaataatttataagttttactaactaaatgtactaaaaggggacaacaattagtatgtcgcgttctgtaaacgccacagttctgcataaaaaaattatagtatatttttttacaatactcgaaatttcattttataattaatgtcgctaatatatcgttgactagtgtaaaatattcataaccgtttttccgtttttattatttatatcttatttatcttatatttagtttaataacgaagcttacattcaatttacagccgttacaacgtgtaagtatacattaaggacctagtccgtttattattaacacactcgatgatctgttagattagttatggtatctataggtacacatttataataatatattgttactcaacatgtttaactgttgcttgacgttcataatctgtatatgtggttggtttcttaagctagtaccaggaactatccgagcaaaatggcgcgaggacgttttaccgctaagtcacatactatcaataaaccgacatttcatacaatgcagttgaatataataaattcacttacattgttgctttcttttgcaacttcatcacttgctagtagaaatacttatggtttatcaactaatggtgttggttgtactgcacaaattgcaacttcatcagttggttttaatgctaatttttacaattatgttggaggtgatttaattgatctcaataataaaaactttgttgcaaatgattatacaactagaaatatttacgcctctgctacaggtgttactgaaccaaattttgatcttgctaataatcaagtttataatgctacaatttatggcttacctggtgttagtgtttacagtactgttcttgaattaaaaggttattttacaggtatgtacttccaatttttaaaacttcaacaagatatttaaaaaagaattatcaaatactaacatttttctatttttacttttatgatttataatatagctcctgaatccggtctttataaaatttcagttaatgatcttaatgatggtgcatggttttggttaggatcaaattatgcttttgattgttgctctcaaggttcaatcggtgattcttccaatgacgttcttttagttgtcagagataacggtagttttggctcttacatctatctcgaaaaaggtaacatgtatccaatgagagtcgttttcatcaacatttattttgctgctaaattggaatttgaaattattactccaagtggtgtaatcattgacaattttgaagattatatttcgaattttgaaacaagcgatgtttccgattgtacatcaattagtgcaattaacacagacattgtttcaacatcagtcacaattagacctggtttagtaaacgattttactgattatacaagaaccaccattttaaatgatgatgatggtgttttgcaaccaaccacttatattgttgaagaacttttatttaatagagctgactatattagaactattactacatctggtgaccaagcatctgtttacactgttacaacatttacatctaacgataatggtcttgctggtgttctttaagttgttgttcaaaccgctgctactccagcttcaaaccagccaagtggatcagccaccagtacacattcaattgttactttaccaacaaataatattgccggttcaggttgtcattttgcaaataacttttatactgaaaaccagggttttagtgctaaaatttactcatatgatgctgatgcaattcaattagcaaatacaaaatactatgctaacagttatactacaaactctcttattaccaccgacactggtattccaagacctaatttctctgtgcatgctatcgcttttcaaactgaaactatttacggtcttccaatttacaacacttggaacggttttgttttagaacttactggttattttgttgctccagaaagtggtatttatgaatttgatattgatcaagccgacgatggtgcaatgttttggattggtaatgctaatgcttttcatgttttacacaaggtaaattcccattcaattcagatgatggattccttttatttaataatggtgatgaaagtaggggttatgcaaccttagaaaaaggtgtttattatccagttaggcttgttctaattaactggtatggtgactcaatgttaaatatgaatttcaaattaccaagcggtacagcaatgctacaaaattggtcagattgtgtcgtttcagtttctgatgtgcaagatggtgcatgtcttccaagtgatcaagatttcttttctacccaaattttgagcgttgatacatctctcactagtgatactacacaatggattgatacaacaactgttgagaatggcgtgaaaacaaacgaatttattgaatctgtcggttatccagccccatcttctactactgttcaagttaacacatactcgggaacaattacatctaccagtacatcatacagtttctatagtgacgctacaactacaacaccaattgaatacgattatatttacgtaccaagtccaaaatcattaactccatctcacacttatgcttatgaaggttccaccacattcacatcatccttagtttacacaaccactgatgctaatggcaacactatcaccaccaccgatgttgcagttcttgttccagttgattctactattacttggactggttcagttaccacaactgaagttatcacaacatgcgcagttaatgctgaaggtaaaccatatactactgtgcttactgttgttgaagttcctgcatgtcaaacatctacttggtccaattcgtactcatccaccagtgttactactatcaatgatgtagttacaactgttgtttatgttccatgtcaaacatctacttctacttggtctaagagctattcatctactgccgttactaccattaatggtaatgtttcaactgtcgtctacgttccatccaccaccacattaaccaatgcccaaattacttccaatgttactgcatctgaaacaactatcactaaacctgttgcaagttcattaacaaccgaggtcactggttcaaatggtattgttttatctacatctgtttccctatcatcatccattgaaatctcaagttatgaaggttcaggagctaagttaactggatcttttggatttatcctctttgcttttgcattagtcatctgatgatttatgtttattatttttcgtagtaactttatgttacgttcacgtgttcatataatttcatttgaaacactgtatttactttataaattactcccccatgtgatatcttttttaggagttgataatttcatcaattttgtagattattaattataaagttctataactaatgtatagtttaatcttactttttcagcaattgttcacttcacacacatgtgtgctcatgacaatgataattttgttcctatattttccataacgcgtgcaatgaaaaatttgattggtggagccgcactttttttaaattagaacctatataagatgcacataagagacacatttatctaaatgaagttgttttcttttattctaatgtttttcatagctgtgcagagttagcactagactcagctcaatagctttaatatataacaaggtttagaatatcaggctttaaatacaggaacgatgcatatttaggatttgtttttacctctatttcattaagcttcctgttgttgaacagacagtcatgactggtaatggtaacgataatgtgtatattaagctaatactaagaaataaaaacaagtacaggagaagatactggagatactttattacaagtttgctaatagaatcataatcattagaacaaaagaactaaattagaaatataattaaataaagtaaaagatcgttttgtaccttcagcttttacttactagctgaaactgcactttttaattttttatcaaaagcattagcagcataaccatcacttttcttgaaatcacctgtaatatataactaaacttctaaaataattttctgaaaaagtttttaactgatctagaaaatgataagtacagtaaatgacggtgttgagcatagaaaattgattcaacattccatttacaaaattttgcatctatatcaataattgaaatatactcaactaaacatttatctatattcaacgttttatagtaacagtcatctaaaagttgatcataatgatgtaaaattaaattacatctttctctatgtttagcaataaatactggattatttggaagaccaataattggataaattcttgtttcaattaaaaaatcataataaaaatttattaaagttgaaaaaactcttgatgaaatatcaaataataaaattaataatgctatgactaatgataaatgtaaaaatttgtataacgacggatgtgcatttataaaaattttcaattctttaaagaatgggtaagatgtatttgatctacttgatctacttgatctacttgatctacttgacttgcttgatttacttgatttatcagatcttctggattcacttgattcacttgatttatcagatcttcttgatttagctttagtaggtttttgagttggctgttgataggtactttcatagtcagtttcaaattcagatgtataagaatcagcttcataatcagtttcaactccagatgtataagcatcagtttcatagtcagtttcaactccagatgtgtaagcatcagtttcaaaatcagtttcgactccagatgtataattatcagcttcatagtcagtatctacagttgaagtataatcatccgtaataaagtcagtttcttcatctgaggtttgattatctgaggtaatatcagtttcattcccggaagtataagcatcagtagtataaacagtagttttattgatattttcctctttcttattcatagattcatctttagttttattagcaatatcttgtttagctttattaatttccaattgatcaattatattccattctttaggacctgaacttttacttgattgtcttgagttgtgagtattagttctagccatatgttaaatgattgaattgaatacagaaagcaatctctacttcagatttgaataaagaaaattaaattatcgcttatataataaatgagatgaataattaaatgaaacaatcttattatattgccattggattcctttagtaaaagtaaacaataatataactaatgtagctatgtacctaagttaataagtttctcattattatatgaacttagaaattatattaactcgaaatgttcttcaacaaaaataacgtacacatgctatatagtacttcgcattaaaatagggcaaattcactggtatattcaattttgatcttgatatctgctgagccgccagattaagtggatatttgctataatcttaatttaatgctcagcttattatcatattttgccacttatcttgatattatctctttttggtaaagtacatacccgggtgtaattgattataacatgagattatcagctattcattcatttacattatcatcgtttttcacaacttcaatatttgcatctgatgatttaaatgatccaactgctacactaaaattatcatctccattttcaccagaagatattcaaataaaacctcatctaggagtttttgatagttgtgcagttactggtcttcctatagttggtagagctggttttgatgctgtattatatactgatgctattactgatatgaattatgcaagtggttatgcaacttttacaccagttgctacagtaacatcagttacaaaccctgcaatttcatttacaactggaacaaatcaaactccaaatatttatggttatccacttgatgtttcaaatggttttacagttgttcttaccggttatttattagcaccacaactaggtttatatcctctcagtttaacaggtattaatggaggtgccgtaatctggataggtgatggtgaagcttttgattgttgtgctaataattatattcctgaaacttcagattcaacatatattcttagccacagattacttattgatccaattgcatccgttgcttccttagtggcaggtagatactatccatttagaatggtttatagtaacacttatgaaaattcaaatcttgactttgtcttaggtttgcctgatttaaccccagtaagggatttctctaactatgttattacaattacaagacttaacggagtcaattgtatatctgatgaggatgaagaatcatcaagttcaagctcagaaacatcaagatcagaaacatccaccttaccaacatcaagcttgacatctagttcagaaacctctaattcagaaacatcaagttcagaaacatcaagttcagaaacatcaagttcagaaacatcaagttcaggttcagaaacatcaagttcagaaacatcaagttcaggttcagaaacatcaagttcagaaacatcaagttcaggttcagaaacatcaagttcaggttcagaaacatcaagttcaggttcagaaacatcaagttcagaaacatcaagttcaggttcagaaacatcaagttcaggttcagaaacatcaagttcagaaacatcaagttcagaaacatccaccttaccaacatctggctcaacatctagttcagaaacatctagctcaaatacctctagttcagaaacctctagttcagaagcatcaagttcagaaatctatagttccaaaacctctagtttcactacctctagttcagaaacatcttcagaagcatcaagttctgaagcctccactttaccaacaactagcttaaaacccagtacaacatccagtacaagtacctctaacacgacctccgcctcaaaagtttcaagttcaacaagttctaaaacatcaactaccaaatctagaaacggtgcatcttcaggatttgtcctttctaataattacttttatttcattgaacttctcatctttgaaatggccatgatttaaaatctagtttgcattattatgaatttttcctctaaataacttcaggtttcaactttgctttaaatgattgttttctttgcaaatctggctatataataacttgctgatctattcttaagtctgtgtatttttataatcaaaatataaatataacattaaaaatttagtgtttaagaagttatatatacctttttttaccgttacacaaagtttaattgattttgcgcatagttcctaatcaggaaattcttcttttcaactctgggattagcgggacctgaaatgttgatagaatttattctgcatattttattaatgatgataagcaatgtgttggaatgttcaatgtggaataagataaactgtaatagttgaacataaaccaatagaaacaaagaaatcagtttatcaaagaaatggaagctaagccaaaaaataaatcaaagtattattcaagaagaggttgcattaattgtaagcgtgctcatgtaaaatgtgatgaaaagaatccaatttgtggaagatgtctcaaaaggaaaacacagtgtgaatatgcaatggattttcaagtaacgagtgcaaatgaactaaataataacttcaaaataaataaaaaatcaaaacctaaaagttcagtctttcaaatcatcaatgaaacagacaagatatcctctactccaatgaaaagtacagaaaatttgttcaatatttcaataatgaataaaaaaactgaagctgatggacaagtggattctgatagtaaaatatccactatgtcattaaataaggtattggagagtcgatattatatgaaattgaaaaattcatcagcatccgaagcaagtgatcacggaagtcagttttcattttcaaatataaatattaatgacttaatttctattaaacaaaatgatctaatttatcaaaacttcacaaatggtgggaatgaacttgctttttcctttcataatgaggcgtttcaaccaaatctacacatgtttcatatcccatgggatggtggcccgctggtatatttcaaagataccattgaacaacatgatccaatgctctttaatgaaaacactccattcaatggtcagaatatgattgattttgtatggacaatgactcgaataacaaaaatattttactcttttgtactttattctgaaacttcactactctttatcttggaacttttttttaaattgggtactaaaagtcgaattttccataatattatgacttatcattgtgctttacacgttataaaggtttacacagaagttggacatttgaaagctgccaatatttgggatcaaaaagtaagaatcccagcatttagaaaatgtattgaaaatataaaggaaggtttagaaaaagatccaactttctcaaatactgtcattctaacatttgctgttttgtccattttttcaggaaatgtttctgatcgaagctggagtacccatttgaatggaagtcatcaattgattaacaaatgtttaagcttaagtaaagaagcaagagatgatgatccttttgataatgtagccttgaatttgcttgatgtgataattgagtggtatgaacatattaaacactctgctgctttaacatcgttgaatggattctggaataaaaagctgaaacttaaatcaatttacaaagggagaggttttagaaaaaatgctgcaatagctgataataacatcaatctaatgtcaggtcattgtttagagcttaatactataatttcagatatttatgattttatgtttgttttggaacaaaataatgtcagattatccggactcaactttgtttattttctattaaacccgaacgatcaacagataattaaaacggttcagacatttgggaatgaaatactaaagcatataaattatcttataagagaatatgaatatattagattggatttggaagatgttagaatggacttgtctgtgagatattgtaacatgctgtacatgtatggggtgaagttatatgttacatttttctttgttggtgaaaaggatacatcaataataaaacctttgttaagagatatcattgatttgatttactcaatgccttatagatcatcatgtgctagaatttgtcattggtgtatttatacatcggcattggtttctttaatgattgaagactataatttgtacgggcactttttagggatgctgaaagtttttcaattgaatggtatggagataccttctttcaacttacttgaaaagatcaaagttattcttatagaaaaggaacattggaaattactcctacctgaaaatgatatcgtaatatactagatagctactaaattttattttattaaaagttataacataatacaagtctgaaaacggctaaattttatacatgagtccatttatgtcttgattaattttcatcgtcactggattcttcttcatcactggattcttcttgtaagacttcaatccatttattaaccttttctctgatttcaggcatttcttgtgcctctttagaattccaccaagcaacaatattctcatcatcaagaatatcaatatcatatagcaccacagctatacaaccaaataaaagtgctttataattttcatctaatttatgacagatagtttgtattattaataataaatcaatttgatcatcatcatcaaaaacttgtctctcaaacatcttaccccatttacggaaaattttctctgctgcatctttagtacccaaagtagcagtgttgataaaatgattgactcttttaatcatagccagacaggaagcttcacgaacttcgtgatatgtaacattcatactcatacgtaaagtatttaattctaacattgctgtatctaaatcatggttattttccatagcacgttcaactgttgcaattgcttcttcttcaaaattttcagtttcatcttcagagataaatccacttgcagatgaatgtgttcttcttttctttttatttgaatgatgaacagtaatcgaactggatgctatagatgaatcggataaatgtaatttttccatttcataaactatccctgaagaagtttcagcagtttcgaattgattttcttcataaaggaaaccaacaccattgataccgacaacatcaggatcacataccagagaattttcattatctttaaaattgttgtcatcatcgaaactatcatctgatgaaatattagcactagaagtaaagtcattaattggagttttgataattttcatgttgtttccaacaataacagaattatcaatgacaacaccaaaaccaatgactgacccaggacttaagataacatcttttctgattaatgcatcattggcaacaatagagtgttttataatacaattatcttcaatcactgcaccatcccaaatataagaattttcaataacaacatttgaaccgatcttacatgatctaccaatgactgaattttgaatttctgttctatcaccaataaatgagtctttaccaattacaacaccagattgtaatttacatgactgagacaaaatgacgttattttctttataaatatgttgagaaccgtaggtgtatgtttgatcaagtaacaaattcctttcaggaacgataggataacaccatctttcaagaacatcttgagaaataccatcatatgtttgccaactttcaactcttgcagaatattgatccttagttatgtaagaataaatatgtttttttaataaatcactactcaaaacacctttcacaaaatcagatcttaaagtttgataatcaaaattttcttgaaaaatagttggaacagttgctgtacaaatatcaacatgacaatctatgagattattattaatttcgaattcttgaatatcttctaaaacttctggatctatattgactgatgactttttcccattaattggaggtaaatcttgataatataaacatctattggttgccttatccataataaagcaagcaggttcaataatagatcttgaacgatgcattggtgatgcttgcgttaaaaccattgtacaaatataatcacgatcactttgtttataaactttatggtcttccaagacttttgaaatatctaaattagtaacaacatcaccagagacaagaataaaatctcctgtaattaaacctcttgaatccacatctctcatagcatcaccaacggatcttgattcctttgatgcaatagtttgaatttttttaaaaggagatgaaacgttagtccatttagaattgtcaatatattcttgaatttgatcagaatgtgagcaacacataatataaacttcatttataacatttgcttgagctaaaaattcaagggtatactcaattaatgggacattagccaatggaagtaaacatcttggtttaacagatgtcaagggcatgaatctagtttggaaagaatcagccaggacaatagcttgcattttctggtcatcctctccagcatctttgttattattcttaggtggcatcctgttaatgcttactcaacgtttcctatcaaacgatcaatcaaaatagaagatcactgtaactctacacacatgtgcatttcaataatttaatataattactcagaatccattctcatggcacagtctgaaaaataaaatttttcaatgcttagtgcggcgacgaaacttttacagtgagtgaggtcttggtataacggtagtcttttgtgtagcagatatgcttttttacaaattagatatcaaccattgtgtaatttcgaacattgattataaatattaagaaaatttaaaaatatgataaaaagtataaaagtctttggacataaagtgctgtgttaaaataattatatgggatttttatttcaatcaccggccgctttttagattattgaggtgattcagagctaaatcaaatgtgtgtatataggattgtacttcaatttcacctctcaagctaaatcaaatgcatatttactcttctgtcttaattgtttaccccatttcataaacgataagggacataagatcaaaagaactgagaaaagacctaataataaaccggcccagtttgtacccattttggtaaacatgaacgttgcaaacaatgggaaaacacctccgaaaatagatctcaaaaatgtgttacctgcaagagcacttgcagctaaaaccaaatatgtatcaatgacatagtttaatgatggaacaaaaatagaaattaaaccgaaacccgtaaagagacccgatacagtaggaacaatccaatgaactgttctatgataattacctgtccaacaaaaccataataaacctatagggaaagcaataccaccaaccaacataggaggtaatctattttcgggaatgaccttaccaccgctttctctcatttttctgttatatgttctttcttcaaaaatgcaataagccccacctaagaattgaccaataactaaaccaaaataaggtaattctgcaacacccggtgccataccataaccatctgcaaagacaattgggtatgcacttaagaataaataaaccataccataaatgaaagcattataaagtgtaataaaaaataaaattggttcagtgaataacatctttaaaggtcttgttaaattattttcagctatctcttttatagtcaatgaaaattcatcatgaggtgcatgaataccccaattacctgtttttcttctaatttctcttgccttataaaccaaaataattggatgatgtgtctctgattcgaaaaccaaaataaaagcaaatgatgcagctgaaaggataccgactaaaaattcagtccatctccacccaagactatgatttgctacaatgaaaccaccaataaaaggagctaataaaggaccaacgaaaaccgccatagcaaaaatgacaattgcagtaccacgagtttcattaccaaacatatcagcaaaagaagcaggaacaacaactaatggagcagcacctaaacaaccagcaaagaatctacaaatgagaatagattccaatctatcagagactgcaacagcaaaattaaaacaacagaacgtgaatgatgacataacaaggacaggtcttctaccgtacaattcagataatggagcccaaatgattggaccagtagcaaaaccaagaacgtaaagggtgacagataaagttgtaacaacatagtggacatgatagatttcagccaacggtaagacagcttgtgcaaaaattgcagaaccaaatgcaacacagaaagtattaataccaatcaatgcacattgaatcagctttttagataaagaccaattttgtggatgtattgggtcttttgggccatcaaatccaacagaataagcagacacatcaggtaacattgggggatactctttatcatcccccatcggtggaattggctcattttcatcataatgtaaatcatcaacaccagttaatcttttggataaccgtcttgataccttttcattagtatctgatgctaaatcttcattataaccttcttcatttgaattattcttcccattttctaaatccaaatcatttgaatcattgattcctgtgtattgtgcgacgggttcagggactgaatcactcattttgtatcttgattattgaataattcggagttgtagttgggcgcctccgagatgaaaagaagtaggttctatggaaatatataacaaaaaagatatatatattcaagaaataaaaacttaatcttattaagctaagcatataatatatttatatgtaatatctcatagggaaaggtataaattacagatttaaatctagatgaacagaatatttaataactgagtatgagatgcagaaattaaaagaaggcagggtagttttttccaggcagtgcaaatttgaatccatctttctatcggctattttctccaatttgtttcaaaactctgacttattaatgcatgcatgttaatgacaattaatttagaaaatatttaaattattaagctgtttgaaagatatttacttagaaaatgaattttttataagaaaaagaaatttttgaatttatattaacgttcaacttaaatcaaaagcataactacttttttgtcttaattttttaccccatttcatgaatgacaacggacataagatcaaaagaactgagaaaagacctaataataaaccggcccagtttgtacccattttggtaaacataaaagttgcaaataatgggaaaacacctccgaaagatagatctcaaaaatgtgttacctgcaagagcacttgcagctaagaacaagtatgtatcaataatataatttaatgatggaacaaaaatagaaattaaaccaaaaccagtaaagagacccgatacagtaggaacaatccaatgaactgttctatgataattaccctgtccaacaaaaccataataaaccaatcgggaaagcaataccaccaaccaacataggaggtaatctattttcaggaataattttaccaccacttgctctcatctttttgttataacctttttcacaataaatacagaaaataccaccaaaaatttcaccaataactaaaccaaaataaggaagttcagcaacaccaggcttcataccataacctcttgcaaaaacaatcggatatgcacttaagaacaaatagaccataccataaataaatgaattgtaaattgttaagcaaaataaaattggttctaagaataacattttaagtggtcttgcaatattattttcacaaatttctctcattgttaaggagaattcatcatgaggtgcatgaataccccaattacccgttcttcttctaatgtctctcgctttatgaactaaaataattggatgatgagtttcaacttctaaaaatataattgttgcaaatgatgcagctgaaaggataccgactaaaaattcggtccatctccaaccaaggctttgatttgccacaatgaatgcaccaatgaatggcgcaactaatggaccaacaaagaccgccatagtgaaaatgacaattgcagtaccacgagtttcattaccaaacatatcagcaaaggaagcaggaacaacaaccaatggagcagcacctaaacaaccagcaaagaatctacaaatgagaatagattctagtctatcagaaactgcaacagcaaaattaaaacaacagaaagataacgatgacaaaatgagaacaggtcttctaccatataattcagataatggagcccaaatgattggaccagtagcaaaaccaaaaacataaagggtaacagaaagagtggtaacaacataactaacatgatatttagcagctaatggtaaaattgcttcagcaaagacagcagaaccgaatgagacacaaaaagtattaaaaccaataattgcacattgacccagttttttatagaatggccaattttgtggatgaattggatcatctttcccatcgaaagcaacagaataagcagaaatatcaggtaacattggtgggaattctttattatcccccattggcggaattggttttgaagtatcaatatggaagttttctgcatctgtaagtttacttgaaatctttcttgtaaaattttcttttgattcaattgatctatcatcactcatatcagcaccattttctaaatcctcatccccaattgaagctttggtgtaagcttgaattggctcagggataagattactatccttttcactatcagacatttggtttatttaaataattgaaatgtttagttcgtcaaatcagtcaaaaaaataataacaaatctatgaatagcaattaagagaaagaaaggatactcagaaatgtggataacaaacattatttaaaagatgataaattgtagtttgctgattacaccttaattgattaattttgtatgtcaattagcaaaatgttgaatttctataattttggggacacaacctgatgtaaaatatttttttgacgtatatgattgaaagtcctgaaatagtaaccaaaaaacattttcagttcgttcaagtttccggttttgtgtaccactgttagtattaagatcttcttcagcatacttttacattagaacctttaaccgttattatttccatcataaagtttggtgtgtaattgaatttctagagctttcacgtcaaaaatttcgttaaaaatttcttttatctttgattgttgtcacactgtttgcactgcctataattttgttcagaaatttccctaacacgtgatgttttttgtttataaatttgtgtgtgaaacattaactgtgagtgcccatacttgacaccactttgattatgatataagttgataactccggttacaataaacgtcacaaatccagtaattacgtagatcattactatggagatcatcactaagatactaaaaccttaaattatttttttttttaaattattaaatttctaaatttgtaatacaattataatcttctaccagtttatctacttctaggaccaaacaattttcgtctatatataagaactataaatattataactaactaaactataatgtaattattagcctaacgtcgtattctaacttcatagaattatgtaagtacatatattgaggactatattacagaattaaatgagatatttagatttagagaaatgtatactgcactttttattgctaatatacaacgttttaaagcagaacggttgtgaaaaagaaattattaactgcatgatgtattaaacgaatcatacatcatttaattgtaaaaactaaaacataaatatagttggaatcactgtgtatttttttatcttcaacatttgaatgaaaaagtcgattatgatgtataattatcattagtattaaatgagaaaaatgaatatattaggaaatcaatttatgtcgaaagcatatttactcttttgtcttaattgtttaccccatttcataaatgataacggacatataatcaaaacaactgcaaataaacctaataataaacctgcccaattagtacccatgttagtaaacatgaaagttgcaaacaatgggaaaacaccaccaaaaattgatcttaagaaagcattagctgccattgcacttgctgcaaaaactaaataagcatcaataatatagttcattgaagggttgaaaattgtaatcaaaccaaaaccagtgaagagacctgaaacggtaggaacaatccaatgaactgttttatgataattacccgtccaacaaaaccataataaaccaatcgggaaagcaataccaccaaccaacataggaggtaatctattttcaggaataattttaccaccacttgctctcatctttctgttataatctttttcacaataaatacagaagaaaccacctaaagtttgaccaataactaaaccaaagtatggaagttcagccacacctggcgccataccataacctcttgcaaaaacaattggatatgcacttaagaaaaggtaaatcataccataaatgaatgcattataaagtgtaatgaagaataaaattggttcagtaaataacatctttaatggtctagttaaattattttcaacaatttccttaacggttaaggaaaattcatcatgaggtgcatgaataccccaattacctgtctttcttctaatttctcttgccttttgaaccaaaataattggatgatgagtttcaacttcaaataataaaattgtaacaaaagatgcagcagccagaataccagtgatgaattcagtccatctccaacctaatctatgatttgcaacgatgaaaccaccaatgaatggcgcaactaatggaccaacaaagaccgccattgagaaaatgacaattgcagtaccacgagtttcattaccaaacatatcagcaaacgaagcaggaacgacaactaatggagcagcacctaaacaaccagcaaagaatctacaaatgagaatagattctagtctatcagaaacggcaacagcaaaattaaaacaacagaacgtgaatgatgaaataacaaggacaggtcttctaccatacaattcagataatggagcccaaatgattggaccagtagcaaaaccaagaacgtaaagggtgacagataaagttgtgacaacataatgaacatgatatttagcagctaaaggtaaaatagtttgagcaaaaattgctgaaccgaaagcaatacagaaagtattgaaaccgataattgcacattgagcaactttctttttaattgaccaattatgaggatgaacaggatcagttgtaccatcaaatgcaacagtataatcagctgaatctggtaacattggaggataatttctatctttacccatttttgggatatcttcatttggatcaattttcaaacgatctgcaccagttaattttcttgataattctcttgaaagatgagaacttgtttcaactctcattaatcttgcatcatcagactcaattgaaccagtttctaaatcatttgaattattgttatttggaccagtgaagggttgaattgaatcagaagtttctaattttacaggggttggaacattgatattattattattattattattattattttgagtggaagaagaggattctaatgaaaccttttctgaacctgtagtagaatcggtattatacattattgatagcctcgaaagaaagaaataaagtaataatggactcaaaaaaatttttttttcagaaagagcctataaataaggagtgatttaaaattaaaatagattaataaaattttctatattaataatcttaaaattgtgaataagtctgaaagaaatatcaggaaacaaaaagaaaagagtggaattaaggtggaaaattttttttttagcgccgctccgctagtgtggttgtttggatattgcaatcagtgaggttatttaaatttatctggggaatggagataatagtaacagtgtgtggataccccaataatctaatttataattctgtaaaaggtagattgtatcattgtaggttgcatgtgagaagggggaaaaaaccacttcctatattacttttatttgatcctagctattactcccaatgttaccgataatacccgttgataagcggtaaaaatacattgcccagttttcggtatttttctgttaagaccgagggctttattcctttttttcacatctaaaatccgattatctcaacatagtcccatagtcttaggaaataagccgactgcaagacgtgtcacgtgtattgtatgctaagccttgtaaaagacgcgactttccaaaattgatatttttttgattgataaactgatctaacacaacatcatgaataaagcatcaagttaatgaatcgatgaatacataagtattgtatatattggtaggcatattgtacttaagataacaaccaataacttacgaataacaattccaactgcaataagtcactatgtcatcaattgatccaaatacacaggtgaataacaccgattcttcaattacaagaactttataccaaaaattacttgaatcttcacatccaatagctttattgtcattcataatactacgtttatctccaattgcaatttatatatttggtatgatatttacttcaaattatatattatttttcattttaattattttattaattgctgcagatttttggaatgttaaaaatatttcaggtcgtttattagttggtttacgttggtggaatgaaactaatgatttaggttcaactgtttgggttttcgaaaatgctgatcaaaatagatatattaatccaatagattctaaaatgttttggcttttaatgtatactgtacccattgtttggggatttttagcaattcttgcattattaaaattacaattattatctcttatattagttataattgcaatctctttatcattaacaaatacaatggcttatactaaatgtgataaatttggtaaggctaatagtattgcatctggtatattctcatcagtttcagctaatattttctcaagtttcaatcctttggctagattcttcccaagtacaacttcttaaggaaaaaaaaaagttatgatattctattataattctataaaaaaacttatttatgtcaattatttactgttcaatttatatttaataaatgacttatgtgcaattttattagtacaatcaccactccatttttctcctaatgcttcttcctctttctcaaattttccagattttaccgttttcaaatatgtacagttaatatcttcacgaatggtttcaagttccttatctttaataacataccctttgagtcttttatctttaaattcgaaattcttattcagattctcacttgaaatgatctccataacaatttcaagtatacgtttatctaatataacattttgactaattgtcaacataacttgtcttaaattttcaatttcaactcctttaggtattctactaacaacaggtattggatcaattaaactaccaacatttgataataattcttttataaattcactcttaccttgtgaataatcaagtaaaaaatcccataattttttatcgttaattttttgaacaaatgttatagccttttttggatccttaagtttatcaataatgagaatcaatgcatttttattctctccaatcttgctcattaaataaactagttcttcaatacattcatattcttcacaaattttaatagctttatcaattgaatacttaatatgtctctttaaaaagttcagcaattcatttttattgaatttagcaatcaagaataccatttcatcttcatagtctttaacaagtataccatcttcttttctcaattccattaaataaagataattcactttttccattttgttttctttgaatattttaagaactctctcaggtacaatttcatgactattttcaactaaaatatggatattggtaatcaattgttccatatcaaacccagattcattatcattccagtctcctaatccggatagaacaatttcaggtaaaaaactaaaatattgttcaatcagatgatgctcatccatgaactccaaaagtttggtatcttgtaacttaatcatctctgaaacacatttatctggttcatctaattctaaacttatcataatataagtttttcttaaatcaataatcctttcactatctgcattttcctttaacgacagtatatccgagatccttgattgtagttcatttaagtcaaatagagaatgatcccatttatcaaaatattttgtgaatgattcatactcctttgtatctaacagttcatataatattgaatcataatacttatgactaatttgatcttctataaacagaaaagaagttgatggtaatatatcacaatacttcaaaagtaaagatttactttgtaatttttctagccagtagttccacttttcaaccaacaattgtgtaaattcagtatcactactattgtctattttcaaaatttcctttagaaaattaaatgctttatcaaaattttgtgattggaaatctttttccacttgcttctctcccaattttaatctttcataatcactgaaatgtccttcacttaatttccaagcatcaaggtattcctccttcaaacaataccattctatcttgtcatccaaactaaatacttcaacaataatagcatcatttgcacttaccaaaatccatttaacatcattgagtttcataaggtggtaatcattcaaacctaatccccgataatcttttagtaataattcatcaacacttatttcatcatatgttttactattcataatgtttaattccggtggtataaactcctcatcttcatccttaggtatacaattcaaaatcatcaaatcatctttatatgttgaaacacccccaatcaaacaatcatccaaaacttcataacttatcaatccaatatcaagaacagaatcagttgtatttaaattatttacacttaattgccatatattcgacacccagcctattaaaatacgattatcctcagtaaattcaactttaggccagtataattccggccgactgatactttcaggtacaggtatatgaaatacctccttagatatacttgactgaaagaatgttatacctttattgttcgcccatatgattaaatcatttttatatttaatcattgtaacacatcctccattttcatctaaaattgtatcatttctttgattgaaccagttcttactgcaattgataacactaccaccagtacctccacaaataaatgatttagtctttgaataggactcatttattgcaactgcataaattggtctcttaaaattatatttggtcatttctgattcattaattgtagttcccgttgaagtttcctgtattcgtccaacaattacagtcccatccattgagcatgttgtgaaatattcaccatcaaaatctaatgatagtactgatgccgtgtgtgctttgaataatttaatagtttcataatttggtgtagctattaataccattcccgaatgtgtggcaaatatgaagatttttgatgtgattaaacatgcactcactggatccttattaaagaatctgggtggaagtttagtaagccttttgtatttaaataatggtgggtcagtttcatccatacagaaagaaaaagtctattatgatgaaagaaagattatcggtaattgtgaaaaattatactaaaacatcaacatttctattcagatgattttgttttcttcttctctagggtctcttatattcgtcatggctagagcaatcaaggggatgctcatcaagtgcgatccatcaatcaagtcacttatagtgaagattgatcaagattacagggatattgttattgaagaattggatgatatgcatttacttattgatccatccaaactcgtgtttatcaaaaaggaacttaatcgaatattagcagataactcatataatccatttgacgacgttgaagaatagactactgtatattacaatttttatgtagggttttgtataagaaaagaaaataaaattatagaaattaaagaaagttatgaaattagagttcaagattatcgatatcttgttgaacatcacgaagaatcatattatcatcaacatctacttcattatcatcatcacgtaataattttctaacagtttctgcccagattctgttgatatcatcaggttccatagcttgtgatataatatcaccttcactagatttttcactaagtaatctttcatggaatgatttatagattgtttgaaattcttcttgaataccatctaaaagaaatgttttaactcttgtatcattaatataatcatctattaaactttgtaatcttggtatctcattctgaatattagagattagtttttgattaaggtccaagattttggaaatacttgaaggcatagttgataatgtatcaacaaatgaattagatgctaatttaataaattgatggacaatatttctgatttcaatttgtagttcaacacgacaatcaacatagtcattaataacttttggaattacacctaaaattctatcaaaaaatgattggtgttcatttgagttaagttcgatcgtttcttgaggttgattagtgaaccttgaatacagacttttcaaaggactaaaatctaaaaccgtttcctttctggcatgttctatttcaaatgtattgatataatctctgaaaagaagtaatgattttatctgataaagcttatactcaatagtattactggtaataaaattattttccattgaaagaagtgttaaatgaacaattgaacttgtaatatcatcaaaaacagcttgatttaatgattgatagatttgcgttaacatttcaatagacttaacaataggcggatagatttgattagaggataatatatcatcattcacttctttattacttatgattaattcttttcctgttttcttatagttaacaatattaacctcaacatatctgtttattatgaaaattaatcttgtttgtgcatcttccaaaataggcttaaataatgcatcaaaatttattctatttatttggaattcaaaattaccatcttcaatattgaaaaccgagtatgatttcaaaagattaattagctcacaaagtgatttaatatcagattcttttaaaattttatttctcaataaataatataatggatcaagtaacgaagattcaaaaaatttatgaacagcagttaaattcatggaattgtcaatatctgacatttcattgatttcagttggtggtaagaaaaataaattttggaatatctcaaattctttttcaagtattttaacaaaaaatttcaagcttgtattagacatattgataagagattctctgttaaaattagcatttgtttcccttaagtgtggttgaataatcaattccattatcaaagaacctctagttttaaaatattgattgtaaacatcatctagaaggttgaaataatcatcattaccatttgtacgtttgtaaatttcaacaaataaattataaacattttccatattatctgtgaaatctttatatacaagagcgtcaataacaatgtttgataaattagcattatttgtctttgttgttattttttcaccaaccgatcttatgaatgtaactagataatttctaataagtgacaatgcacgaatcatacattgcgtgaatctaaatctataaactctaatatctttataatcagcacagcgtggttcatcaacaaatgcaatacactcatccaatttaaccaatattttatcatgaaaggaagattttaaaacaatttctgagttattgttcttattgagcgttttcactattgattcaagtgaatggaaatgttgaaactgatctttcaaatctttgtacaatacttccaactctgacaattcatcaacaagattagtacattctttttgaaatgttcctgtttgtgatgtaacactattatgaatatctacaagagcatctacttgtttcaatacatcttctgcatcggaaataaatcggttattttcctcttttgtatgttctaataaagcaagcagctgtgagacagccggtgggagagggttcagtaaagtttcagtttctgatggaatgtcaagatccaccacacccaagcgggctacttcatcccaaacgcgtcgacgttcatccaatgacaagggagtcagtaatgttgtaggtatagtatctttaacagttgatgatggaaatgatgatcttctctggctaaccggtagtaatataggattcatcgttgtttatataagaacaattgtatatcatgaatctgttcaaactttgaacatcgggattttttgtttacaaaaaaattggtgaaaaaattatgaatgttgatgagtataaaaaaaagttatcttgtcaaaattttgacggaactacagtttcctccatttaccattatgccaaacccaattttcatcaattaggttcagagaaataagttcttcaaccaccgctatgttattttgaggggatatgctattaaatacaggtaaatcgtttatagtaacagtattaccactatgagagaatatctttactatttgctcgctccatcgtctgaaaggagataaatcaatgacattttcattaatggagaatcttcttaaactgaattgcaacagtacttgtttactttgctgaaaccttaactttttccaatttctatacacagtcgcatcatcagctactgcacactctcttacaaaatccctcaacactatcatactaagtgtttgagaaacattctctttttcatataataaagaaagtgtagtttgctcattattgagactcaaaccaataagagacttgacaacaactcgttcaagttcactcaccacatctaatgtgaaatatctatctatgactttttcataaaatgtactatagggaaccacttccccattctctaccatgttcatttcaggcacatccaaatcaatgacatctacagttttatgtctttcttttattcctttttcctttttgttgagttcttctcgtctttctactgaatgtaacgcacttaacgcgtgttgtgaacttaaatcaataacccatggtttattaaatatttccctttgttccaaaacatcaccccaccaaataacttgttcattaaaccctacgattttcattgatttagccattatactgatatcctcatatcgtacttttattttccctaccatttgaacgtacatcccttcttttaaacctccatcaattttaacctccagttgagcccatatatatttatctataacaacgcgtaaattctccataaatgatccatcatcgatatataattcccaagtatgagtttcatctaattcaactattctgaaaactttccccactatattgaccacatttattggccaattttgtaacattcttattccatcattatccaaaacaatacctatatttttataaacatcggttcctcttttcgtattgtaaatatctaatgttgaaatagttattggttcattcattgtttcacacaggtgaaacattgatggtatataatagttccatattattttatcaattatggttctgaaagctattcgtggatcattgggaacagtatcaatattcatgttcttctctaatttgtgcattgcagctcgtaatagttccatgatttgatgtcaaagaagaaagtactctaagtgaagcgttaacggagaaaaccgaaattttacatgcctgatttaattttgaatttattaaattccactcccaaagaccaaccttcttctttcttttactttaaataagcatgcctccaattacttgtcatattctagacaccacaactgggcgcccagctgctaatgttctatgtgaactttcatacttaactgaatcaaatgaaacaattgttaaagcattaactaattctgatggacgtgtaacgaattgggaaggtaatcattgggttactgaagaattaaaacctggtacttatagagttaaatttcatacttttgactatttccaaaaaatggatagagaaacctttttcccatttgttgacattgtttttcaaattggtgaagtacctgataatcattatcatataccattattgttaagtaattatggatactctacatacaggggtagttaattaagaaaatgtatataagatgtatattattttactatactaaaaataagtgagtgtaatttgaactttggggatcaactatcatttcgttaattttataatcatttatttcaattctaatagctctcatttctcttggataataattcatcataatgtaaacttttttcatatcaggatttgaacgatcgtaaatatcactactgaatgtaatgccattagttattgaatcagcaaatttaacattagcattttttttattatgataaatacaacttgaacttgtactcgcaattatatgttttggtttaaatggaccttcaggtaatttatatttactgaaaatatcttcatcatactctaaatgtgatttgggttcatgtttactaataaaggataccttacgtgtaagtttatttataactgtatgtggttgaggttgaatttcttttgaaagaatgatgtttcattaacacctgcaattgtggaaatataaccaagttcatcatcaggtattttagaactatcaattttagaaatacttggtaatgacatatcaggatctatatatgaatgatcaacatcttcctcaactggtgtaaaaatacgcgtggatgattgttgttgttgtttttgttgttgttgaattggttgaattggctgttgaacttctttggaatttctcttaaatgatagatttttcattgaaaatgaagaaactgatgatatagatgatgatcttgataatggttttgtttttgacttagatttacgtgaaaataaacgtttcaagaaacctttcttgggtgattgtggttcaattggtctagtttgttgtttcggatttggaacagaagttggaggaggtaccggtgcaagagatggggcaggcactgacgtcattacaggttcgggaacgggtattgattttgaactaattggagctggagcaggtttcggagttggagatggagttaatcttggagttgagatcggagttggagttgaagaagatgatgattgaagtggactggtatacattgattttgatcttagatggggtgaatgagtgtgtggtggagatattcttggatttgaggaagttgtagctgaagatggcggtgataaagttgtattatttgacccattgtttgatctattatttgatccagtatttaatccagtatttgatccagtatttgatccagtatttgatccagtatttgatccagtatttgatccagtatttgatccagtatttgatccagtatttgatccagtatttgatccagtatttgatccagtatttgatccagtatttgatccattattattattttttaacatttgtggacggctatagttcctgttagggccattttgttgttgataagaatttttatggatctgttgttttgatagtggttgtggggtatttgaatactgggtatgttgagaatgatttgagtagttagattggttatattgaggatggttgtagtgttgataagggtattgattattttgaggcgggtattgattttgttgatattgatactgagttggagaatataattgatatttatattgatttgtaggatattgttgatactggtactgattattatactgattattatattgattatgatattgacttggatattgatttggatattgattttgttgatgatattgagaatatttctgaggatactttttaatctttgttctatcaacttgagtggtcatattagttctaggaacattcatattggtattattactaatattttgattacaattactattcactagagtatttgacctatatttatgcttttgacgaggtgcaaatctttcatcaatatttaacatttccgatacagaatttgatcttggtataactgtatgaaagttttcatcagttattgaagatatggaagacatggacattctatgtgacatctttgtcttatatttatattaaaacagttataaataataccaacacgagaataggaaagagaataataacgatataatttaatcgatagatacagcaataaaatccagctaataatagcaacctttatacgaaatctaatatacctaatactaatatgaagcaccccttaataaatttaaattaatgactgtctaaaattttttcacactttgccaaacgagccccgcgaaggaacccagttacaaggagaagggtcgtccaagccaccatcgacgcttcattggaattggctgtaggtactgataagggtggtgatgatggcatgttgatgtgtccctgtaggtattctctttgatagtgtgtaaacttctgcccacgtgtttccatctaggagtgggaatctgcccttatctgtgtaaaatgatgattcaattgtatttatgtaatcagtatcgtttaattgacatgaccagtagatacttgcatcaaatgatggtaattcaactattccaccatcaggtttcggttcagcataacgtaaatgaagtgggaaattaaaggtcccattagcaattcctataatatttgtatcaattgatgcatcaatctcagtcccccatatatcaacaagatatgatggtaattctaaatcacatttagatattgaaatatcagaaaaaatagatctttcaagttcatatacatcaacaatatattcctttggtatcactgaatgaatacgcaattgacattgtgaattgtactctttctggtaaaatttcattaaaatttgtaatattaaaagccacaactggatggaaagctggttcatcctttaggaaagtggctgtaaatctttcagtttcacttacactttgatgtgcaataaaggggaaaacagttttaacgatttcatcatcattacctcttataccatgagcaattccttcattaactgttacaattgcaaattctgagttatgtaatctaggtattttactaatttgtgcataaatgtacattctaatatttttttcatcacctattacttctaatgcttcaatattatcaattttaatattatccggtattgtaacattcaaccaattgaaaatattactatattctatttcatcatcatcattattactatgatatgaccaccattctttgaaaaatgttaattttgatttattaggagtatcatttttcaataattttttcaaccaattttcactttgtaatttataatcttccattgaggatacattgataggagatattgcaatattcaaacctcgattcatccaacccatccattcccttaatggtaaatggctcaatagattattacttatcaatctccctattcttacgtaatgacaaatgaaatctaacattatccgattgtggtaaatcatctaattgaatctgagccaattgtggaatccttcagcaaatatacatcatcaaacacagtatccctctctatactatccttcctctctaccactactaacgtacgcattgtccagtgtgccagtagtgcctaatgtatccaataactaatcctataagaagaagcagtgtacgagtaaaacacaaaaaagcccaaagtgaaaaagacgcgactgaaagaacaccacacccaacaaattttcacatggtaaataactatgaagaggggccacgttggaggtttctcgttttttacttctctacgttataaattataaagactgactttgttgccctcgatcctttttaacttcctgtccttttacctttggaatctgatctcttcttttttaatcttgaatttctacctcttttatcaactcaattactttaactaaaatgtccgttgtattctcagatattgcaaaagcttctaatgacatcacttcaagagatttcttccatgttgctcctttagctgttgatgttaaaactactgctgctaatggtgtcgttttcagctcaaaggcaaaatcttcaggtgataaagtctcaggttcaattgaaggtaaatatactgataaaaaaactggtttatctttaactcaaggttgggcaactaataacgttctttcaactaaagttgaattagcaaatgctgttttaccaggtcttaaaactgaattagtctcagctgttactccaaatgtttcaaaatctgttaaattcaacaactattatactcatgatgctttatccgcaagagtctttgttgatttattaaaaggtcctgtcttcaacactgatgttaccttcactcaagatggtttcaccactggtggtgctcttacttatgatgttgcatctgctaaattaaacaactatacctgtgctcttggttacaaagctttagattatgctgttgctttagttgcttcaaacaacttatctgtctttactactggttactaccataaagtttccccacttgttgaagttggtgcaaaggcaacttatgattcaaaatcaactactccaaaccctgttgctttagaaattgcttctaaatataaattagattcaactgcttttgttaaggcaaaggttaatgattctggtattgttgctttagcttatcaacaagaattaaccccaggtgttaaacttggtttaggtgctgctgttgatgctttaaagattaatgaagctgctcacaaattaggtgcttcattatcttactccgcttaattattatgaaaaaaaaatatcttattttaattctaaatttatgatgatgataatgatgatgatgatgattgattcacgtatattatatattacctatacttatttattttatatctattttatagttatatgttagtttaaaaaaattacttatacttagatatagttaactctaaacaattataaatcaggctctcttcttgttcttattcttctttgcaattctacgtaatgcacgcatttcattctttaagacaccatcaaccatcttatatttacccttaacaccctttggtctaccagctaatctcttattagaaccagttgcaacaacaagtgtaaccttaggtttagtcttttgtttctttgtcatcttacccattaatgcttgaatttcagctgctttatcagcttcactcttactttcatcatccataataccattactcttcttctttaatttttcaagtctctttaatgcacgcatctttttacgtccttgagcttcaagaactttcttaattggtcttgcatttaattgtttcatcttttccttaattgctaatgcagcttccttagtaattggtctattgattttactatgttgatcttcttcttcaatgaaccaatctggtaatccgtccttatcacggaatgaatatttattaaaaccatcattaattaaatcttttttggtctttttacctaatgctaattcatgtgccattgtcattgcttgtgcagttgcaatatcaatatctgccttatgattttctctcgccttttcagttaattcatcttcagaatcagtttcataatcatcttcattttcttgattattatattcattagcaacaacttcaaaatcagaatcatcatcttcatcatcattttcattatctgaatcatcactatcatcactactatcaacatccattggttcaggttccttagtttttggtgccttagttttctccttaagaatctttgtttcacccttggtattacttgcaatattcaaatcaacatcttggaaaattgaatcactaaagaaattcattgcctttgaacttaaagaattcttctttttacgttcaattgttgcaattaaattagtaattgcttcatcatcatcactatcttcatcatcactatcatcttcatcaacttcttcaccatcatccgatgactgtactttatcttcatcttcttcaataccttcccatgcatcatcatcaccacctcttgcttctttggctcttaattttgcatctctttcctttttacggtctttataagatgcatacatatcatttaattgatcctccaaatcatcattttcatcttctttattaatcaaatgcatattttttgatgcttcatcatctaaataaacatcagtattatttgacatagcatttgattcgttattaaaaataattgtacgtttaccactagctaaatcatccaattgaccagtttgttgagcagttttcaaattaaacattgtctcagatccaatatttgctgcatcaataccaatttgcatatctgttaacatattcatttgcattctttgaatttccttttgcttttgtaagttagattttctcttttctcgacgttgcttcaatcttaatttatctttaacttcctttagctctttatcaattttttcatcttcatttaattcttcaacttctattaaatctttttatcaacatttttttcatcttcttcaatacctaataaattacgtgcatgttttctccatctaattaataatttaaaatctttacgacctaaaacttttaaatcattacaacattctaaaacttcttgtgttgtttgtttcattttctttaatattttccatctaccatcttctttattaattgtaaatttactaacttcaccaagtgtattgataacatcatcattttgttcaatccattcaaatacatccattggatgaaataatgtataatcaccttcttcataaccttgtctttgtcttcttttaacttcaggattaaaaacttttgcttcattattaacagttccttcttcaacttcttcaaaaacatattttggatctaaaaattttggatcaattttctttggagctttaaaatttttacaaacaacgaaaatttcggcagaaacatttctacttgcaggtggtttagttgcttcaactttttcaaataattgattgaaaacccaaattaaattattataatcttttgatctgaaaatttttgtaatgaaaataccaccaacattcaaatgttcaacagctaattttaatgcttgtaaagtaagttgagattgtgtataagcatcttgaacccaatttaaaccaacatttggagcaccatcatgcataacacaatcagctttccaagttttcatataaccagctaatttagaacgacaatcctctgttgtgatatctgattgaaatgtaataacatttggtaatgctttcattggtacaatatcgacaccaatgataagagaattaacaggacataattgtgatgcaacttgacaccaagaacctggagctgcacataaatcaatgacaacttttgaattttcaaggaaatgtccatatttttcattaatttgtaagattttaaatgatgaacgtgcacgataacctttttcctttgcaagataatagtatttatctaaacgaccttttgcgtttttcttttgtactctacccatggttagttctgttaacaataagaagaattagaaagataaatatttgaaaagaaaagaaaaatttcaggtaaaaaattaattgataaaaatttttttttcatgttacgtactataagtaatattcaaaagattggctaagcaacaattaaatttcctattaccgctgtactaccttcttttgtaggattagtgtatgggatttttcagtggaataggtagtgagtcattggatgagttagtggatcatcagaaacaacataaacataaaaataaacaagataaacgtaaaccatccgtttcaatcccttcgaaggagaagaaacgacaattaagaatatctgaatggattaaatctaaaccacatacccaataccctgatgaaacattattatttgtaggtcatttaccaccgaatagtgatgataagagagtaatagctttattagagaaaattgcaggtccaattgagatagtaggggatattaagatcgctaaaagagcagatggtagaggatgttgtgcatttataccattacgagatgcaaatagtgtacgtggagttatacgtgcagttggaagaggtagagccagaattggagagagaagtttagtagtggatgtagtaagaggaggtagaacaaagaattggttaccagttagattaagagggtattagattgtatagtagttggtataatgtatttattacacacatgtgtgtattgtatatattcattgtaaaaaacacgtatattatagtgtaagaatgtaaactttatgatgtgtaacagaccaacaaaaagaaaacacatggcaaaaacatgtgaatttaatacattaaatacaaatcaattattgataatagttctacaacacttctttctttctacaaatgtctctattaggatcacttaagtgtattatctgttctgcattactatttggattattctatcacgttcaagaatcatgtccaattggtaaaccaataccattaacacctgaacctgatgctgtatgtgttaatgttcactctgttgctcaacacgtgatcccatactatgaaattagtaaagattacattctatctcaatgggatgcattagttgtcattctagataatgaagatttacctaaatccattaagaaggatgaagttatcagggaagaagcagaagctcttaatggaaagaaaaatgattaataaataatataatctaaaacgtataaatatacgatttgccactctatgtacaatctatataacagtggcaattactttgatatttctttgtataattctcatatctataatactactattcttcaataataacagtaataataataacagtaatagtaataattaaaccctatacttatacagacactttgtgatagatcagtaaagagaatcaaataaactgatcaaatttttattcctagtaaataaatttattctacttaatttacaagttatacacatcattcttcttctttaaagcaatgaacgtgttacgtattatcagattcatagtggcgatctctgccatcgtgtatggttaccttcatgtctcttctcattgtccaataaatgctccattagttgcaactgatccattatgtcgttcagttcattactcttattcttatattgcaaattctccagtttatccttatattgttaaagtttcagattttgctgataaatcaattcatcctcatttatcatctattaaagaatcagttcaagcttatagagaggaacatgaacaatacgttattgatcaaacttataaaactgcttcaactataatttcatctacaactgatttcgttcaatcaactatttggccaatctcaagttcatgtattaaatcaatctataactcttccaaaatttttttcattaagtttaagtatttgtcatttgttaattataacatttatgttaaaccttatattgttaaactattcaattatattgcaaaaacccctattggtgaatattcatttaaattattaaactcttcatatgttcaaacagttttcaaatatacttctatttcatataattatatctcatctatttttaattatattcattcaaaattaaatgaaatatatcaaaattttacatttaaaggatcagatagttatagacttgttcaattaaagcaaaatttcctcaaggattatttaacttttaatggcggttcaactacatcaactgaaccaactgaaccatcatctgattctagctcttcagttgcatctgcttctctttttgataaatatgataatttagttcaatccattgttgaatctgcaaataatgattttaaatcagaatcaaatcaattatcaactaattatttaaataaattacaaactcaatttcatcctcttatgaaatcattcagtaaagaggttaatacaggttatgaaaatatccatgcaatgatttctaatattaataatccagatgctgatcatgtatctcgtgaagcttttagaaatgcactaagtgataaacataactctgctaataaacatgttgaattaattgaaaaggaaattgaatcaattattgaatcttatactaaagatatttataatattagaatagctatattagatacactggaagaatttgcagattcatcattattaaactattcaaatgaaattactgcaaatggtgatgattggtcagaatggaaaaaatttaagaacttgaaattcaaaattattaatttcagagattcattaattgacacaaaaccaaatgaagagtttcaatctgcaattaataaattgaagagtgaagtacaattattagttaatgaaagtggaagttatctggcaattcttagagcaaaggcaaatattgaatttcaagctagagaagctcaagaagcccaattattaaaagatcaagaattaaaacaagataatgatgatgatgaattatatgaagaagaagtatcaacaattacacaaacaagatttgttacagagactatcaatgatccaattgcttcttcatctacccctgaagcagattctgatgctattaaagtagttattcaatcagacgaataattgttcttttactattttgtatttttcttttcatactatataattaacatataataatatataattttctaaaaatcaatgaccttgataccttccttgtctacaattttaacattcaatcctttaaaatccattggcattctcttatttaattcttcttcacataacttcaataattttaatccgtcatcaaggctaatatcctcacgataatgatgatcaagtaatgacattgtataaaatgcagcgtaaccatgagctgcatatggtaaatcacatcttgttccaatataatcaatcatacttaaaaatccttcatctttatcattaacaccagcaactaataaattaacttgataaggacttcttgatctgagtaatcttgctaattcatgtctaacaaatgatgcaatttcatcactttccatttcatgtccctctcttagtccctttaattgtacattacctttaatatattctgcaaaattgattgtatcaccactttcacctgtaattgcaattacatttttttatttaaattaagtgttttatcatcactatccttcaaaattgaaatccctctagtgaaagcttttgatgttgcaatcaatgttgcatctttaagtctaatacccaatacaatgtccatattgaccgtgtttctctgtcaaatagataatcaattaaagaccttttgccctcagtaaggcgttggttgaattattttacaattttaaaatctttaaatttctccatgttattatacaatttatgttacgtaatcaatggtctttactattactactgttactgttactgttgtaggaatctaaccttcttttccaccatttcttacgttctccctcatgtaaatcattgtactgttccaatatacgtgcagtgaggttgttaccatcactattgtcttgaaatctaataatatctccctttatttgatattcacccccatttactaaatcttttaaaacaatttctctagtacgttctaatgattcaatttcactaattctgtcaatggattcacttaagagttcatcaaatgcaggatgtgatgcaatttcatgaaatgctctcatcattggaacagaatcggcacgtacttgacaatctttcccaatcgtgaaaatatttaatttatcgtattcttcaatatagtcaggtctagtcatcacttgtcttgctctccaaagtggtaaatgtggtagattagatacttcaataaggtcagcattggtaccttgagtggaatctttagtatatttacggcgtttatccatttcaactaattctttcatcaataacattgcactgattgaaaattttccctgctctaaaacatcatcatccatgtcaacccccagtaatgcacaattatttaagaaccagagcttttcgttgtcgataatctcgtgagctgccttaaacatatccttttgtgatgcaacatggttcagatgttgaggtctaccaccaattaaatggtatatcttattacattcttcatcactgacttctttatggaaatactttaatctactacccttcaatatcttactagcttcattcattttagtatcctcaaaattaataacttgcattcttgtagctaatgttttcatcttctcaaatagccaataatcttcactgataaaaatcattgttaacattccagaacatgagaagttttctgccttttgttgtaataattcaactaatgaagaatcaatcaaatgtgaattattcagcactaaaattaatggtttcttggtttttcctcttctattatacaaaatcttctctaatttcataaatgcacgttcaatatctaacattggtgtagattctcttggtcctttcatactgaacaaacttccaatataatcttcgaaaaactcaaaattcaatgcactaccaatccgtagtctcattaattcaacatcagatgaacaatcaactatggcacaatcctctcctccacatctactaatactctccatcacagtactacttttcccagttcccttttcccctaatagcagataatatttacccttaactttacctgttactatcttatcaaggattttttggtgtggtctctctgcccataaatgagcatccatgatctcagtattatctttatgtcttgctaacatcaaagtttcttcagctttgaaactttcctccatcttccataaaacattttgtttgtatattttatggtacataacaccacctagtactaaaactcctagtgatgcaaacgttattaatccagtttctgcacatttcttcaatatacttataacttctctccatccactactatttttgttcttcttattattattatgatctttgtccttggattttttcgtctcttgaatattacgaattcttcctttagcttttttaattacctgttcatcattattttttttgtcctcttcaatgctagataccatatctgatggatctatgggaatcaatggattgacatatcgtctggaacttatgtgaaacaatcttgtccctgctttgttcaattgtctgtacattgaagagaaaaagaagttgcttaaaaattaataaaacactaaattataacagaatttataattatttttaaaaaaataatgcaactctattcttatcaattctttactgtacacacaactttctttttataaaccaatgctgagattgcataaacgggatcagctaaatgatacatttatacggggattcatagtatcattagttagctgctttatgcagtatacccctctgccattgttaaaattgcttttactgttaattgatgttctcacattttggataagaacaattattaaaagatttagatattcaagggaaaggatattattaaatcaaatcaataattcaacttcatggtcagaattttcgcattctgcatttcaattggataatgtattacattatgatgtttggaaggataatttagtttcagggaagtacgattatagattaattcaagaaagattacatgatttacaaaattcaagaacagataataatttacctaaactgcttagtttattaagagccggaatgttgagaaactttgggggaatatcaaataaaagattgtataatagaacttatattggtacaaaaagattaattgaacaatataataaagaaatctccaactgcttggaatggatagataataacgatgaaattaacaaccaaataaaattagatttctatcatgatgcaaaaactacgttaggctccactgcaatttgtctccatggaggatcattatttggcctttgtcacattggtgtcatcaaagcacttataaacgaagaccttctacccaatgtcatagttggttcgggtgtaggatccgcaattggtgcattgatttgttgtttatcaaaaacgcaagttcttgagatcctgaatgatgtgaatcaagcaatgcaagatgaagggtttacgttgaataataaaaatcaaaaatcaaacaatggagatgaaacagaaatatatttacaatggatagataatataaaaagaggtttaaccattgaactaaaactttttattaagtttatactgagtaagattggtaagataacatttaaggaggcatatataacttcaggtaaatcatttaatattttagtatacccaaactctaacaaaataccaacattattaaattttttaagcacaccatatattacaattgaaagtgcgatttattgctccttgggtaatggtatattagatgatctagaaaatgatccaattggtgatttctataataacatctatcaattaatgattaagtataatgatgaaattaccgagttttcgacagttgaatgtacatttaaaccaccatatcaagttgggggagattccgttgagttaaaaaactcaccgtacgacagaattaccgaacttttcaacgttaatcatttcattgtatcaatttcaagaccatatcttgcacctttcttaaatggagattggagaattacatacaaaaaaaatacactgttaaaaaaattgtcacatttaatcaatatagaattcaaacatagaattagaatgatgagtcgagttggcatattatcatcactaatgaaatggttgttagttgatgaaaaatcgatgttattggatacaaattatattcctatcataccagttggaaactcgtggtttatttgggatatattcaatttgtttatgcaaaatcactcagtaatggattattggattaaatgtggtgaacgaagtgtttggggaattcactctttgttggaaacaagagtacggacggaaaaattacttgaggaatactatgaaaagtataggaaaattaattgatcagttgtcatatttaaaatacctaattgtatactatatatacctaaaccaaacaaagactgtataattaatgttttcctaaattcctatccctactacattgttcaaaaaattggcgtttcttcaatttgttcaaaccctaaaaataccaaaaaatagttgtttttattttctgcttataagttggtcaatttgtaagttttttcaaacctgtttttgttaaaaatttattaattgatcagcaaacaaaacaccctatcaaaaggacgttaaataaagcattttttgtggctggcttacgtaagcaaaatcaaaaggatggaaaaaacttagttgagtggagaaataataatggtcggatggtctagttggttatggcatatgcttaacacgcataacgtccccagttcgatcctgggttcgatcattactacaattattttttgcaactactttattatttgctcctaatgaaatacagttttttttgtttgaacaattgaaatcaaaggttctacaaattatattaaaagaatatcgtcagatttttaacacagtttcgaatttattcacttatacaagtcttctgatgagttgaaaattttgtcatctatttaaaatataacttaacagcactatttgagatcaaatatgagtactgtctagactcgatttgattttcatttggaatcggacctgtagaaatggtcaaagtaccagatatatcatcagcacgtccggttgttaatgcagtaagggatataattaatgatgaacggtgcaatatggaaggtaagtaagttgaggtgaaggatgatgatgtagatgttgttgatacaatatataatgcacagtgtttttgaatttcctgtatttgtgacagtaatttgttgatagtaactgtaggatcaagtaaaagcaccaattccgggttctcgataatgaccactggatttctatttgattttatctcagatattatacttgtgtaccatgaagctaatggcggagcatcagaatttatgaatgaagtgaaatgtaaattctcattattcttgatattgtatttaagaaagtacttgttgtatgtttgaatagtattagtaaatgagtacacatatgacggggatgattctttgttaattgaaggaaagtttggagataaaaaacactcattgttagttgagactgattgttgaagtatacctgcaattaaccaactaggaaaattggaagaatcatgcattattaaagacaaagtattttgagaaggtgttaaggtatttgatttattcttgtagaaagttaatgcttgttcttgtaaatcagaagttgaagccattcttttatgtctatttgtttagctttataaagatcaattataaagagttgacgtatgaaaaaaaaaaagatcaacacaatttgcaatggatgtgcatgtaaattttaaaaacttgaaaatattcatgtagtgaaaaattggacgactattgtaaaaatttttagtgatttaggttaacatgtttctttcacttttctttccactttttcgataaacaaaatgtcatttaccgctgtagcatcatacactgctgctgctaagagaccaattgaaccagttggccaatattttcttgctcatgcaaccagaaccttaaagggtcacacttggtcagaatttgaaaagatcgaagctgaaaaaaatgttgtttcagttgaagaaaaagatgctgatgaagaattatttgatgaagaaattaatgatcctgaattattagcacatgatccaaaagattggaaaacatgtgatttgtatgctgcattaggtttatctaaattaagagttaaggcaaccccaagtcaaattgttaaagctcacagaaaggctgttttacaacatcatccagataaaaaatcttcaaagggtggttcattagaccaagatggtttcttcaaaattatccaaaaggcattcgaaacattaatggacccagctaagagaaagcaatttgattctgtcgatgataatgcagatgttgcagttccaactggtaaaattactgataatgctgaattttatgcggcatggggtccagtttttgaaagtgaagctagattctctaataaacaaccagttccatctttaggtgatgataacagtaccagagaagaagttgaattattctataaattctggaacaattttgattcatggagaacttttgaatggttagatgaagatgtcccagatgacaccagtaacagagaccacaagagatacattgaaaagaagaacaacaatgccagaaagaagaagaagactgatgataacaagagattgtctgatttagttaagagagttcaagctgaagatccaagaattaagaaatttaaggaagatgaaaaggctgaaaaggcaagaaagaaatgggaaagagaagcaggtgcaagagcagcggaagaagcagctaaggctaaggcagaagcagaagctaaggcaaaggcggaagcagaagcagctgcaaagaacgataaagaagcagcaaagaaggccaaggaagcagcaaagaatgcaaagaagaagaataagagagctatcagaaatgctgctaaagataacggttatttcggtgatgaagataaagcagctattattgatttagatcttgatgctttaattgattcatttgatgatgttaagttaggtgaagttgcatctaaattaaaggatgttactggcgatgatgctaagaaggtcttaaatgaagttgctgctgaaagtaaactttcattaaaatactttgtttaattttgatataattaattaaatagattacgtatatattttacatttctaattattgatgaataattttatattgaatcgagtaagtccattttaattctatatactaacatgagtttgagtaagatacaaaaatatatggtcctaccaaaaccaccattttgatttctttgaactattctcgtaatcatttatcacattttgttgatcctttagattttgattcaatctagcaactaattcattttgttgtgtttctttatcatgaacatattcatcatattccattgcataccaagcatattgcattgtcatataaaccgcactggcacataagaaaaacgaagtcaaaggtcttttaaaatccgacaatgtcggtttacttaaatgactatattttagccaagcttctctttgtaattgttttatttttgcttcttctttagcttttaaagaatcaaaacgtttttgaattcgttgtaaacgttcatctatttcagcagatttcgatctatattcaggagttaatggcgactggggagtatataatttagatgtaacttgttgaactttcttttcataatctcgttgtttctgtaacatttgctcattactgagcgtactaagtttactttctatagattctgcagttattggggtatttgatgtcatttcactatttgatgtaggtttaacattttgatttgcttttttgacttgttctgccaactctctctccacactctcgggaaatacaaacttcatcgtctatgaatgataactactaccctaactactactctgtaactctttggaaagaaagagtctttaggttaaatttgcgaaattcattgaaaaataaaatcacagattttgaaatttcactttgctattcgaaatgccaccttaaaattacagattgctattaacataaagcctatttatttactatatctagataatggaacaaagtgtaaatatatacataaaatacaacataataccttcatatataaaattgatagaatcttcacaaaaaaaaccatcaccattcagaatccccagttgctttttggaagacataatcttttccattgatgttcatcaaaccatccttaagagaacatttccatctatttctcactctctgcacacgttcatataagcataacataatattttgttcaatatcattacctgtagaatcaccaccttcaaattcaccattttcatcaccatcattatcatcttcatcatctgaatcatccaaatcactattaatggcatcactatcatttcctaaatcagaacctaaatcatcgtcatcagaatcaaaatcatcatttctttttgatgtctctcttggtgctgtagagatggatgatggattaattgtagtaggagctgaaataatggaacttggatctttctgtatttctaatgtcactcccccatcttgtccatttttagtcatggtcatagatacaggagctccaactggtaaaccatctgtgggtattgtttcaaataacgcatcatcagcatcttcatccttaattttaactttgatttcattattattgttatcattatcattttcattatcattatcttcatcgtcatcatcatcatcatcatcctcatcgttatcattatcattaatttcaggatctatctctgaagcccatgggaatgtagcaaccttggtagctagtagcctttgacgccagatattacggaggtcttgaagtgtttgttcatcaattccggcattctcaaaatcttgacgagattccaggatgacttcttcaattatatttgtatagagtgacgcacaacctgtattagacatgttccaattacccttacttaagaacggaatgcaagttaccaacaagaaagcctgaaaacactacagttgctaaaatttgcttaattttcctgtattaaaagacgagggcaatccactttttcagcttttcaaccttaaattgctagtaggagtcttttccttctttattgaggtgtccatcttcaccagaggttctaattgcggtgtgtagatgatttaaccattgagtaatactgtactgttactaacatataaaatactgtagatatatctgttaatctgataggaacacatattaaactgaacttaatcctactacaataataatagacatataccaaaatttgcgaaatttccgagattgaaatttatcgcaaattataaagattttcatttggaagataattccgtttcacaaccgcactttaattactatagtatatcataatttaatttaataattgaaagattaaaatactacttgaaattatcaagaataataagtttattaatcatattcaacaaccaaatatttaataatacactaccacaatggagtcaattgaatctctacgtgcagagaacaatctcctacgcaaaaaggtggaatatttaaacaaaataatcgcttttaaagatgcaactattgaagaacttcgagcaacacagacacaactcaatccatcggaagaattattgaaattgcacgatgtaattaaagagaaagatgataacaaacatgatgttacaaaaatggaagattcatacggaatacgggaggttaacgacgatgaagagaaatcaccttttttgaatgaaaatgacgttgatgatgacatcgatgaaattttagatgatcaaattctcttccatcaaaatagaaattcaaatgatatggatgattacattgaagatttagaggatttagaagaaccagaaattcaatttgctaatgtacacacagttaaatcttttcacaatgctatgtcgaatagcgatattaacaacaccagtaatccagcaggtcgtttgtcaatttcttcgacaacttcatctcattattcagatccaagtcttgaatctccatccccttcaccatccggcttcaactcaataactaattcaataactccttctataatacagcctagtttactgttactacctcatcctaatgatacaaatgatacattgagagaatctgattttactggtatcgaagctaatccaaataacgcctcacatattgatgatatcaacactacattatcaaaagattcatcctctgctgatcttcatcactctgaaaatgaacttattttcactccattacccgctgaagaatcactgttaactcagacatcaacaaatctagaaaatcattataaagcacatagtccgcaccaacgttctgtaacaccctcctcaatgtcaagtcactctaatttactgactcaagaaactgcattgaatttaaggtcaaaaaatgtaactccaattaggtctcagaatcaagatcaaaatcaaataagtagtaaagcattaaatcatagtcacaacacttcaatgagctcacaaatttcaaatggtaatggaagtcaatttttgcttaatactttatcacattgtgtgattagaattgaatcactaatagatcctcaaaccctttcgtcaccaccagattcatcatcttcaacctcatcttcatctacaaatatgagaaggaataattataaagtttcatttttagtttataccgacgaaaaccctgcttgtttgacaccaatatatagagttagaaaatcttacattgagttactcattatggataaatcaataagacagttactgccaaatttaccaaacttgccggactttaatcaaattgcttcattaaactataagaactgggcaaatagtaaaaaggttattcaaaactacataaatcatttattatgtttgttgaaaaatcagaagcctttaaaccaaagaaatcctatctggctaaaatttagtgattattttgaatttaaaatggatccttgaaaatttagaaaatcctgaatacagtgttctcaatttacagactaaaatcacatatttattttacatcagaaaaaattttacgatgaaaacttacgattttgttagtttgaaattcaacaacgattctagcgatttaataattaatttcattttatccaaatcttcagaagttttgtcaaaagatgaagtcaatgtatcgtataaaaaccaagagattataataaagaagaaaaagaagttttcatcttcaaaaagttggatattttatgctgaaagtgactatgatgcctcagaattatgctcaaggctctcagcctggattggcttctcaacatcagaggcagatgaacatgatatacctgatatttcttttgagcaaagtgagcagaatgatcatttagatacattatctaaaacctctcttagtgataatacaactcaatcttcatcaataaatgctccatggaaattattcaagaaatcagctaaaataactcaacaacagttaacaaaaagtccgaatttgagtattaatccaacttcaccattaaggggacattcaaatcacagtagctcaataacatcatcaccaaatgatgtgctgaattttaaggcaatgccttatgaaagtaaccaactgcaatatgattcaaaatcatcatcatcatcttcagttttattaaaatctcctatgaaattatcaaatgagatgtcctttaaaccaattgacgatacaccaaaatatttcaaatcctctttacaacattcctttgatttatgtccaaaatataaactgtactcacatgatgttccatcaatagtataccagtgtatcacatttctatatgaacagagcggtgaaggttttgaaggtattttcagattgaatggtatgatgtcagaagtaaataaaattcaagaaatatttaatgagaattatgattgtgagttatccaaattatcacctaaaccagatgttcattcaattgcaacattgttgaaaagatatctacgtaaccttgaagataaattaatatctaacgaagttacagtagaattatgtcaaataataaataaaaataccacgaataataataataatgttaacaattcaacaaacggaaaggctcaaatgatatctttgagttcatatggagtgaattcttttaaggatgtattccaaagtaagattcctgaattgaataaaagtgttttatttgttttattcaaatatttatgtgatgttataaaaatgggtaaacataataaaatgtccgtaagtgcgatgtctgtattaatgggacccaatttatcacatacagatggtggtggacaaatttgtattgtattattagaaaattttgatcaaatctttgtataaaaaatagtgtaacaaaagttaataaataaattttaaaaattaaacacaattataaaggcagatgactacgaataccatttttaacacctttctccttaaccctccaagaacctattggtaaagtttcaatttttttaaccgttttcttaatccataagtaatagagcactattccaacaattatacatagaaagtttgtaaaataataaccatctttaatattgacacaatcaccaccattctctacacaaagatttttcatttcattagcataacatgaataaaatggtttatcaatgaatacgtttttatctaatggagaattagttgaattaacacattgtgaatacgaaaatttatcaattaagtaaagaacaataattttaggccattgtccaccaaaattagataatgtatttagcattgtcatataggtaccaccaatcaatggatcggcaattttagtatggaatgaacaaattgatacaaattgaatggttgacatgaatgaagttaataaatgttgaacgataacaaacaaaaagtatgaattactaatctcaccgttctttgggaaactataaactaaaacttgacccaaaatagcagcaattattctacctaaataaccataacgccaaggttttaaaggttcatcagaattagaccatctagctgcataatatccaaagatgatttcaaatgggaaatcaattaaaactgttatagctaaatcttctcttgaaaatcctttatctagtaattttaaatttgttgcaccttcattagcttgaaatgcaattttacaaactaaatgaagtacaataaataattgaatattagaaagtttaagaacgttaaacatcttataatagacacttttaatagaatcatcctcctcatcatcagttatgttatattcaattttattgacattatattcagtatttgacatgctattcatttcaatgttatctaaatcaattttgatatttggtggattttcaggcacaaataatgaaataaaaatagtaatagctaaatataataaacctgaaaatatcatatattcacctaatgtaacaaaccctctattttgaggaactgaacggaaatatttattcataaaatcttttgaattaaaagcaagaaaaatagtaaatgaaacaaagtaaccggtatttaaaccaatagtttgagcagttgatgcataactcaaagcatttttacttaagatagtcaatgcccatccatcaactgcgatatcttgagttgcacacatcaagatcaaaaagaagaaactaattgaaagtaatgataaattttgtaaaattaatgaattatctgaaatccaagaatcgatttttagccccaaaaaaatcaatgaaatacctgatattgtttgaattggaataatccatgaacgtcgtttaccaatatgagataaataacatgaatcaacaattggagaccaaataattttcaatgaataaggatatgaagcaagtgagaaaaaaccaacttgtgaataagataaattatttgatttgagtaaaaacggcacactaccaaatgctaaaccaattggtataccttgaataaaatataacataactaataggaaaaatcttggataatcatgttttggaagttgtatatctttttgattattttcatctttatcttgatataggctttgaactacatcttcttcaagatcggaaaatacacgaccattattaggtgaacgggatctgcgatgtgctcccattttcaactcaatgacttgttattagagggaattggtatcaaaaattcgaaagaaaacaagatgaaacactacatcaacttagttaattcaaaatttgaaatacgtaatattggtaattaaagcttacatgctttcggtgataaccggctataagagatctatataggagatggtttctttataacttcacttttactctacagttcatttacataatgatattaagatacacttaagaagagctaactacatagattaacagaaaaatagatacgaatactcatggtactaatatatacctatctatcgacgtcttttggaatctctttcagattcatcttcattttcctttccttcatcaacaatttcttccttatgttcatcaatatatttattaacaaaatttacaactttatcctttaaattaactgaatcaactaaaacaacacataaaccatcactaccaacttcatattttaaatgaccttcattaggttcagcaattgttgcatcgaatgaatcaaaaaattcattaacattattccattgtccttacttgacgaactaaaatttcttccatatcactttcttcaacattaacacttggattaccatcttcaccatctttaattgatgtattagctaaaactaaaattctaaattcattatcgaaaacagattcttctttaactggtaaattatctaattcttgttcatcctcttcaacttctcgacgtataatatactcttcgtcactcattgtatccacttgatcgatgtatattatatatgaaagaaagaagaaaaaaagtaaaaaccaaaaaaataatttttgtattgaaaaaaaaaataatctcagtcgatcaatacaatctctacaaacaccaagtttcttctcaatcaataatgacatcaccacaaccatcgttaactgcaattgaacgagaaactcaatcaatcaaacaactaaatgaactagtacaacatactatcggttcattatcctcaatatctgataatcttaacgtgtttcatgataatctatcaaattctaataaattatcaaaaatttactctgatatctatagagagaataattcattaaatgaaactttacttgaaataaataatagcaatatagaaaaggatgaagaactggatactcaaatatcgtcattggaatcacaaattgctgatttgaaaaatcaattgaatagttaatgctttcaatgtatagtagataccctatatatacccatgatataatataatttcataaaaagttaatggaataataataaataattcgttacacaagtaaattcaaaagagtgttataaaatacaataggatctaattaattaattaattaattgaatgaataaattaagcagtacttccctcatctctaacaattttaaccattaaatcacccatatcaacactatcaccttcattagctaaaactaaatcaactttaccagaaactggtgctgaaataaccatttccattttcattgcacttaaaactgctaatgggtcacctttcttaacttcaactccatgtttaactctaacctcaacaacaacacctgccattggtgcaccaacttcacttggattatgtgcatctgctttagctcttgtaactgtttcaattgctgcctttttatcttcaattgtaactttacgcatttcaccatttaattcaaaataaacttctcttgtaccgtttgataatgataaatcactgattgctaataagcttaataattaaaactttacccttttcgatttcaacactaatttcctctccaatttcaggtggtgctaagaatgatcttgttggtaaaactgataaatcaccatattgttcataattcttacgatatgcttcataaacttttggatacatgttataacttgcaacatcagcttcagtaattgttgaaccaaatcttgcaaccaaatcttccttaatttcttctaaattaaatggttctaattctaatcctggtctaccaattaactttcttcttttacctttgataatattagttcttaaaggttcagggaatccaccatatggtgtacccattaaaccttcaaagaaatctaaaacagaatctgggaaatctaattcatttgctaaattttcaatatcttccttacttaatttatttgaaaccataaattgagctaaatcaccaacaactttggaagttggagtaactttaacaatatcacctaataacatatttgcatcttcagtaagcattcttagtttcttcccattgttcacctaaaccaacttgttgagcttggaaaattaaattagttaattgaccacctggaatttcatgtttataaacttctggatcaggacctttcaaatcagctccaaaacatgaatataataatctcatttcagcccaatatgaatctaattctcttgcagaactttcaggaataccagtattaatatcaccatctaatgcattaatgaatgcacttaatgaaggttgagaagttaaaccagacattgaattaacagcacaatcaacaatatcagcaccagataatgcacaagcaacataagttgaaacacctgtaccagcagaatcatgagtatgaacatgaattggtaaatttggatatttagatctaattgaagaaattaaaatttttgcagcttttggttttaatgtacctgccatatctttaatacctaaaatgtgtgtacccattgaaacaattttatcaattgtatttaaatagtattctaaattatacttcttaccaggaattaacatatcacctgaataacaaatagttgattcaataacaccaccagcttttctaactgcatcaataccaacctttaattgatctaaatcatttaatgcatcgaaaactctgaagatatcaacaccattatcttttgcttgtttaacaaaatgatcaattgcattatctggtaatgaagaataagcgacaccatttgcacctcttaataacatttggaatggaatatttggaactaattttctcatttgtcttaatctttcccatggatcttcatataagaatctcattgcaacatcaaaagtagcaccaccccaacattctaatgcaaatgcattttctaatgcatgacttgtagttggtgcaatgttcaataaatcaattgttctaactctagttgctaataatgattgatgagcatctctccatgttgtatccataatcatacaaccatcaaattcacgaattttctttgcaaattcttctggaccatatttaagaaggtaagatcttaaaccaacagttgaaggttttgaaacatcaataattttacttgaatctcttggatcatgtaaatgaggaatttcagcatctttctttaatttagggaaaccaatttgacctttaattgatgaaccattaacacataaatcaccaagataagccaataatttttgagctctattcttagaagaaaccatttcaaataatgaaggagtatcatcaataaaagttgtccaacaatcaccagagatgaaaacaggatgagttaataaagctaaaaggaaaggaatattagttttaacacctctaattctaaattcaactaaagctctaatcatttttcttctagcaatttcataatttgaacctgaagttgaacatttaaccaacattgagtcataatgaggagagataacagcacctgcaaaaccattaccaccatccaatctaacaccattaccaccagctgatctataaacttcaattttaccagtatcaggttggaaatttttagaaggatcttcagttgtaattctacattgaattgcaaaacctcttgttgtaattttttcttgtaataaacctaattgttctaatgaagcacctgcagcaatttggatttgagctgcaacaatatcaacaccagtaatttcttcagtaattgtatgttcaacttgaattcttggattaatttcaatgaaatagtgtctattttgattatcaaccaaaaattctgcagtacctgcatttctataattagcagattttgctaaagtaacagcatcttttaaaattgcatctctaacttcaattggtaaagttttagcaggtgcgatttcaacaactttttgatgtcttctttgaactgaacaatctctttcaaataaatgaattgtattaccataattatcagctaataattgaacttcaatatgttttggtttatctaagaatctttcaataaaacaagtaccattaccaaaagcagatttagcttcagatgaagctctttggaatgcatcaccaatatcatcaccttctctaacaactctcatacctctaccaccaccaccaaatgcggcttttataataactgggaaaccatattttttaacaaaatcttcagcttcttcaacagtttcaattggaccatcagtacctggaacaacagggacattatttctgattgctaaatttctagctgaaactttatcaccaacagaatcaataacagtatttgaaggaccaacccaaattataccagcttcttcaacttttcttgcaaattctgaattttcagaaaggaaaaccataaccaggatggatcattgaaacttgatgttcttttgcaattttaataatttcatcaatttgtaaataagcttgaacaggagagaattcaccctttttaccaattggataagcttcatcagcttttaaacgatgcattgataatctatcttcatgagaataaattgcaacagtatgcattgataattcatgagctgaacggaaaattctaattggaatttcacctctatttgcaactaaaattttatttgcatttgataagatttctgaatctttacgtagtttatgtaaagaagaatgatcttcaacagttgacattatcaatagtaatcgacttttgtaaagattttaatttgattaaatgaatacaacactaaatggaatgaaatataataaatctgaaaaatagggaaaaaggtgggttattgaagccttttataaaaatcaattgaaattgaaattgaaatttgaattgccctgctaaattagtaaagggcaacgaaatttagaaaaaatcaaaaaaactacgtcaatttcctattgtgatggagggtcacgatattatttaaattgatttagagggctcgtcactggagtcatgcgttattaattttaaaattttaacaattaatttgattaattggaaaatccccgggccaatcatttatattaatatgactcagattgttgttattattattattattattatcaatgaatcatttattatcatttattgttatttattaagcatatcggttatttttaaaggcttagaaacggcattttttaatattttatcccacagtcttatttagtatacccactatattgactcccattggccgcactattattaactacttatagtctttttttcttgattttgaattttatagagagaatagtctcccttttttataccccccaccccatgctattatttccatatcccgggtttattttttaattataattgaatcaaattgaatcaaattgaatcatccttctaatcatccttctaatcatccttctaatcatccttctaatcatccttttaattattatattattaattcaacgttatgtaaacatacagaaaaacagttttttttctttctttctttctttctttttttttttataaaaattcaaattatacagagtaaacaaaataatattaaaaatatataaattatagtaataaaattaataaatgtatcaaacacttaatttaacttcactatcattaattaaatctttatatggttctaatgcttttttaattgtaacattaacaaatttttcagtttgttgaggtgctctaccaataaatgtacttggatctaataatgaatctaattcatcccaaattggacggaaatattcagtatttttaatacgttcaattaaatcattatctccaccttccattttaacaacctgcacttgcttgatgtgataaaactctaatttcttcatgacattcttgtcttgatccaccatttttaaccattgccataataatattttcagttgccataaatggtaattcactcataattcttctttcaataactttaggataaacaactaatccatcagttatattaattaatgtacttaataaaatatctgctgttaagaaagcttcaggaattgaaattcttctaattgctgaatcatctaaagttctttcaaaccattgaattgatgcagtttgaaatgaatcttgaaataatccacctaaatgtcttgctaatgaacaaactctttcacttctcattggatttctcttatatgccattgcacttgatccaatttgtgatttttcaaatggttcttcaatttcctttaaatttgctaataatctaatatctgttgccattttatgacatgatgcaccaaatgatgttaatgggaataatgtatcaatatcaatttttcttgaatatgtttgaccagtacatggatatgcatattcaaatcctaataattcaacaactctttcatctaattgttcgactttatcatgattaccatgaaataatgataaaaatgatccttgagtacctgttgtacctttaacacctcttaaacctaaatcatctctagctctttggaaatttcttaaatcccataataattcttgtaaccataatgttgctcttttaccaactgttgttaattgtgcaggttggaaatgagtccaacctaaaactggtaaatctttatattcaaatgcaaatttacttaatctattaataacattaactaattttgcaattaaaatatcatatgcatctctaaggaaaattaaatctgcattatcagtaacaaaacatgatgttgcacctaagtgaataatacctgcagcttttggacatgtttcaccgaaaacgtgaacatgtgccataacatcatgtctaactttactttcttcaatttttgcatcttcaatttctttatcagttataattaaatgatttttcatttcttcaattgcttcttcagtaataacatcaagacctaattccttttctgcaattgctaaattataccataattttctccaagttgaaaatctatttctaattgagaaaacgtgtgacatttcctttgatgcataacgtgatgataatggagttaaataagtatcgtttgaagacattatatttgattgtttatttgataaatgaagtaataatttaagagccaaagtaatccaattgagataaagataaagataaagattattgaaaaatcaggaaacaaccacttctttaaataccttaatgctatatctaccttataaatttgcaattaattaatttattttttgacttctctgagggaagggggctcaacttttagattagtaaacccattacgtaattattcatttttcttttattagcatgaatagaagcttttcatgttttcttgatgttttcagtcttttcagggacagtattattttattttatttttattttattttatttatgttgtattctctcttcgttcacaggcaattgatcaatgtcaacaactatacaatcagcaattacttcaaacactcaaggagaggctcatcctgctcaaaagaaactacgtaaaattaataaaccaaagaaatcaaatgagaaaacattatggttagttggtcattcaattacattattctttagtatactctatatgatgtattacgttcaaagaaaatctaaaactcatttagttccatggttagcttataaatttgcacttatgggggtttggttatcatatacaatttcattaaatactcaatataatttaaaatctttacctcattatggttcacttattgcaacagaaaatttccaatatttattattaagtgttgtttggttcttcaatagaagttctttatttaaaattttaccttatacaattttatcaattttacatatatcaaataatttcaaattaaatgcagttttaaaacaagaaaaattatttgcttatattatactttataatgaattgtttttattccctgttttatttgttgatacaatcttattaaaaggtacttccggttatggtttagttatttatacaatgtttgtttggttaagaattttacaaaatgaaaatgcaagattcttcctttatgataatgttacaaaacttgatgttttaatgatgaagattaaaaatgaaaaagttaagaaagtttggttaaaaatcaaaaaattcttaacttataaacaagctagatttcaacaaaagttcttgtaaaattgtataggttatgtatcgatcgattacaactgcatagtttatgaacaaactgctctactacagaataaaattttcatcttcaataatcaaaatcagaagtttttgaatgcttggtaaatttgttatcttcatgaaatttggttcagaagcagaactgaaatttgatttttcatcatttaaatttgattattgaaaaagaaaaaaaagaataaaaacacattactaaaacaattatgtttctctaaacataaaaaaagttatacttattattcatttctaatcagatggtgatgcatgtttattctaaggcacactaagattcaccgaatatttaacgtgaaacggttcacagtcatcatttgaaataaataaagtaaaatagtagaaagaaaatattaaagaagaatattaatagtatatccctatacactaaacatttccttcttactcgtatgaacgtaaatcaagtagtaactaattaaatcaagaaaaggtggaaattactcgccttttatttggaaaaatttgttaaccctagacaatacgcttttattagggttttttcaatttgtacttagcgtgtaagaaatttatttaacggcatgggagagtatacttgatgtgctggaacccgggtatatagatcaatacttatcgaattataggttatagttgcatatatgttttggttgtctttaatatataaaaagtaaaaagaactagctatacagagattttaattacttaagaaatttaattattaaaaagaattaaatttaattagttgctctggtgtagattaattgcttagaatgtttagaaacggccttgataacaccatcttgttctaattgttctaaagcaactcttgcaagagaacctccgatctttaatctatcaactaaaactgaaactgaaacaaatctgtaagttggaacttcctttaagattctgtcatatttttcttgatcaaggataactaaatgttgtgccttatccttaaccttaccctttgaccacttcttcttggatttcttaccaccagccatagctgcagctgcctttgcagccttggattgttgaatctttggaggcatatctgtaattaataaaaagatagtaattaatgttagtatttgtgttcaatcatgaaatgatttattctaatatctaatgaatatactgattatctgtagttttctctcataacttgtcatatccttttctattttaattcattttattatttttaatttttgtataatctttcttttaattcacaatatcatgttgaaataactacaacttatcaatatactgtctcagatatgctaaatgaatgtataataatcattgttttataagtacatacttgttagcttgtttgattaaaagaaggatataaaaactctcaaaaaatatcacaataaaataatagcaaaaggtatataaaacataaagtaaggaattcaatttttcatgaaggtaatacctgatagagctcatagtaattttttttcctctcatgtgactgtctttaaattatactagtagagaaatttaaggaaaaaatgagacgcacaattttttttcgttttttttttcaattttttcaatttgttaaaaaagtggaagcgtagccctggtatgtctcacgtgcgtaaaaagggtttgtggtttttcatatttgggttttactaacatgaataattcgatgtgtaacaaaactgattcataaattatttaaatttattttaatttgtcactaagaataatcacgttatattcattagctttaccccccaacacatcacatcatggctaagagaacaaagacacagattactaaagatacagtagcttatgatgaagatgtagaatcttctgatgataatcaagaaatggaagctcctcaagttgcttctcaatcagtcatggcaactcgtaaaattgcaggtcttggtaaaagatttggtaaaaaatctattaacaatactactgctactaataataactatatcaattgatgataatcgaattatctcaaatgaaatcattaaatgccaattttcttaaatcaattaatgatggtatattgaaaaatcctgttgctgatttatcaattatttgtacaaaatatattgattatatcaataaagttaataataaaaaaatagaagttaaatcattagttgttccaaaagttaatgtgaatccaacaattatcaaagcagctgcaaatgataatgaaaacaaaccaaatcctttctcaatgtttgcttcaattggtgcaacatctaataataccacaaacactaacactactactaccactaccaaacctagtaacaacttatttactgctccaatcaaaccatctgtttctgaatctaaaccggaaccaaaaaccgaaactaaacctgaaacaaagaacgaagttgttgaaagttggttcagattcagattcagattctgaagatgaaaagaaacctgcaaaaccattatcaggacctgcttttgttattaatgaattaccaaaatcaaaagattatagttttaaatttggtaaagttccaaaaaatgaaccaacatcagattctgatgatgatattgaaattaaaggtccaacattccaatcaaatgctgttgtgaaagattcagtatttaaattaactccaccagcaaataataaaactgaagaacctgcaaagcctgcaataacattccctactactactgaatcaaaaccttcaactggtttctcttttggcgctacaacaaaacctgcagaagattcaaaaaaagaagaaccttcaaagccagccttttcctttggtaatacaactgctccaactagctctttacatttactgctaagaaggaagattcaaagccaacaccagctttctcgttcggtaattctaccatcaccccagcgataactgaaactaaaaaggaagaatcgaaaccagctttctcatttggtaataccaccccatctgtcaatggatcagataaaccagcagattccaaaccagcattctcttttggtaataccacaacacctgcagcacctgcaactagtgctttttcattcaccccaaaaactgaacaatcaaaggaaactgaaaaatcaactgaaaaacctacaactacttttgcatttggtaacaactctacaacaacttcatcaatacctgctaaaccagcttcaacatttaattttactgcacaatcaaataataattctgtattaccaagtaaaccaacattcaatttcagttctaacaactcatcaactttttcatttggacaaaaagctgatgataaatcaacagaaagtaaatctaatccatttaatcttggaaatggatcttttggtacagctcaacaaccaagtaatggttcaagtacatttacatttaacgcatctaaaccagcaagtaataaaactgaggatgaaataataagtaaagaaattaatgatgaatcaaatgaagttgaagcagatactgttaagggagatttcacagttgttaaattaaatgagaaagttgaagttaaaactggggaggaaaatgaagaaacactaataagtaaacgttctaaactttccaaatttaattcagaaggtaataattatgatagtgttggattaggtgaattaaaagttcttaaaaataaggaaactggtaaatttagaatattagcaagaagtgaaggttcatcaaatattttgttaaatgttttaattttaaaacaattaaaatatgaattattaggcgataagaagacaatgttaagaatacctgtcgttacatcatcaggttcattagaaacttatttagctagaattaaaactcaaaatgatggtgaagaattgttaaaagcaattcaagatgctcaaggacaattatagttttgaaaaaaaacatccttttctgtaataataaatttcgtaaataaattaaaatctttttttatacaatgtaatccgaatataattaaaatctaaaaagtaatataacaaaacaaacattaaactcttccacgttttaaaacattcctaacgtccttaataaattcatcgaacatcaccaactgataaataatcaatatcaacgttgttctctgtattttcatcatttccatcatttctattattcattttgaataaattgtaaacttcctccttactaccaaataatttgtaactaatctttctaattaatgcaagacaagtacgtaacagaaatatatcaccttcaaataaataaatatctataattctcataacaatatcaatatttaattgatttgcaaagatgacacctgttaaactttgaataattttcaaactattgatatcacgttgaataaaatgattataaacatttgatgttaaatttaataaatacttatcaaactgttcctttatatcaacaagatatgatgattgaattgatgattgttcaattttcaaatctttcgttaatgtatcgggtatttgatcatcatttgatgtaagcattgaatttggtaattttttaactagtatcgaaataatacaattgaatgatgtttcgcaatcactgaaaacataataaaaaacacatactagattaatgatatcaaatgtattaatatctgtaagttgtgaattctttgattttagattttcaaaacttattaagattttcaggattgaatcaaaatgttcaccatattggaaaaaattcatatcagggaatgaaaattgtaaaatagttgaacatttttcaataaagtcaatatcattgccaatattagggttttcctttaagttttcattctttattgattcttcagtagttgatttatagttacatgcttcatcaagtattttctctgattcctctaaagagtttaatatatcatctttttcaattataacttttttagtacttattaattgttttaaccaaatttgccttctaaatttagttggcatatttctccaccaaagttctctggtttgaggtaatttaatcagtatatcataatctttaataactttagaccaaagttggacatctttctcatattgtaatattgatttatgtttattattttgatattgctttaaatttttttgttcattaattaattgtaattctaacagatttttataatctttttcatgtttcatgatttcatatttagcctttggtggtagattagattgtctagtagatgataaatacttgattttatcattattttggatagctatatgattttccgataaagatgatgatacagatgatgttgtagtagttgtattcaatgaattagttgatgctgatacacctaatggagatttcgaatttgatgttaaagtcgaagttgaagctcctaaattagatgtagataatgattttaatcttccatcattcaaagtttttgaagtatttggtacacttatatcactttgatttgtaatttgagacatatttttcaacattgccattctttgtaaagtttcctccaatttcatatctctattctcagttaataatttagtttcaattgataagggattaaatacatcatcttcagaatatctaaaatctgaaatatctgaagatttagagaatattgaggatgctctagttgcaggtgatgaaattgtagaacttggagatgaataatttggatatgggtatatattagtgctagtaaaatgtggtatattactaagacttgggttgatgtttgtgttagataatgtcgtatcatctatttgctttgaaatattatgcgtgttggttatatttgaagattccttcgatgagccagaagttgaatttgatgaaatgctattagctcgtcgaattgtattcattcttgaaatttttgattttttggtagaacttgattgtaaatgaatgtaatgttggaacgtcgaaaactataaggttatcaggtaattcatcatctgagagaaaatttattgaatcaatatttaaattttctggtgaatttttagataattgatcttctgatctttgtaatctttgctttttaattattttcaacctctgagatggagttaatagtaattcccttgaataattattattagttaaatttgtagttgaactaaccataagatgtgaattattagtatttaaagatatagcagaactattgttgctataattagaacgaatatttgttgatgatctgcttgagaatggattaggagttatattagcgattgtatttgatctcctgagattattgttgttaatattattattaccatatatttgattcttcctttgagaaggtttataatctaacggtatatcttcaaaagattcatgtataacatccagtgcttgtgacattgttaattaatggaaattttatattatggtacctcgtataaaaaaatgatttgatattaaagaacggatgatgtgggaggcgaaatgcaaagcgaatgagcaaatgaatggtatataaagcttgtttatatagtgatgaatataaatatgtataagaggtgttctctaatagagagactttggtctagtgaaagaagaaagtaaatgaagaaacgaagaaataaaataaacgatattactactcaggaaagtacaaacgtgatgtgaagaaaacaatacaaaaatatataaaacaagatcaacaataacagagaaggaaaaaaatggctggacctgaaaaccgcgattttgaaacaataacaaaataaaaatttgggagataaaaatagagagtggcgcagttttcttttttcttttagtgggagtgttgcggctggtgtttttataggtatgtctttactttatttcagtaaatatttaaatcctatttttaatattaatattattattattattattattatatacacggtatattattaactatcatcatatctacagagatcatttcttatcactagactcaccttcattgtttttcttttctcccataatcttcttgaatgtactacttaagaatgattcaattcttttcaaattatttggatgttcacatgctgctgtactttcattagcattctcttggaatactccctctaatggtttccaatctggatccatacgtttagctgatgtatcaccaaatgcatctgcaactgcctctaataatgcaatttgtgttgcattagtaggttttaatgttttaacatttaatgtaacttttaatacacccctatctgaacttctatcatgaactggaacaccttgatttggaatatctaatgttttaccactttgactaccacttgtaactcttaattttaattttttaccttcaattgttggtacttcaacaataccacctaatgcagctgttgtcattggaatttcaacattaactaataaatctttaccatttctcttaaacattggatctgattgaactctaactctaataattaaatcaccattacttaatttatatgaacttgatttagttatatgaggtgcatcacctgcacctgcaactctaagtcttgaaccatctttaatacctgcaggtaatctaacttcagtttgtttgatttgggttttaacaccttcaccagtgacatgtattacattgatcttcatgtgcaatttgtacaccagtaccatcacatgctttacatgttgcagccatttggaaacctccttgtaaatgttgaatatgtgatcctgtaccattacaaactttacacgtagatttctttttaccttgttttaatcctgtacctgtacatgtatcacatgcaacaattgcattataatttactttaatttgtgtaccaaatatagaatctttaaatgatatagttttcaaaatttcaatatcttcaccttggaaatgttgcataccacctctacttctaccactatgttgatttgtaaatcctccaaataaatcttcaaagtttatattctcaaatcctccaccttgtccaccgaatccaccaaatcctccaaatcctccaaatccggcaaatggattacctccaccgtatggatgtccaccaccttgtccaccgccttgactaaatgctgctgaaccaaattgatcaaattgttgtttcttctgtggatctgataaaatatcatatgcctcttgcagtgaatgaaatttctcttctgcacctttctcttgattaacatctggatgaaattttttagctaatttataatatgctttcttaatctcagatgctgatgcattcttattaacacctaaggttttatatggatcatcaagacgtgttgaattagttgaatgaaacttacgatattgtacccttggcttgaatttattgaatttatttgtagtacttttaacttttaaaatattgttagcattatgagtaagttttgaataataattatttggattcaatcccgtagacttgtaatgctttaaaaagatgagaactcatttttcccactgaatctttgttttcttagttaaatgaaaaggttgaatattgaagactaggaaagaaaagtttaaggttgaaaatataataaatcctctataactttaccgaattttcattataaaccagatttaaatttcggttacaatggaaaattcgagaaaattacagtaataaaaagtaagcatttttacataatactttaaacatctaaaaaaaccaaaaaaataattgaagatttcgcctgcacccatgctgggagtcgaacccagaatcttttgattagaagtcaaacgcgttaaccattacgctacacgggcgaatcttgtttaaataaacttaatttaggcctcgttttttactgaactagtcacgtgaccgctaccaaaaaataaaagttgtgtttttatttatttgttctatctggtgttattagaacatatttatctgtaaaaaaattagtaaatttgcgtaatttattgtttattacttacattttttagtttttaaaaaatcgtttttttttaaaaatttgattctataaatattttttaatattttagaactataactcattttttataacaaaatatatacttgctcaaaaaatgtccaattaacagctataatgcataatacagaacgatttaaggctaaaattaatgattaatgattttaatatcataaaataatcatgctatatattagtttttttttatttttttaataatacaaacaggaaatataatacaaaaaagtaaatatggaataagatatataaataagaaataaaaaatagggggtatatgaggtataatgttaattaaagatcttccatgatcaagtaatttttatttgactttttttcttgttctgctcttctaatatcagcataacttctgttttgtctcttactcttatgtttagtaaaacaatgtctaaaataagaaatcagacaatttttcagattatctgaatagaaatcaattgacagattacatgaatgttcacaaagagtacatgcggcaacaacaccctttgaagttttaccgaaaactggaattggcatttcttcaccagtagtataaacaccatgatctttacatacatgatgcatgtaagaggaatcatcaacattatggaaaatagtatttaagtccatacctgatgtatatggacaatatggacataagttttgtgtaatcggctttttagtaccatttggtttatatctgataactaatggctgataaaaatcttgcttttgtccacaccatctcagagaaatgaaatcatcaaaggtacgtcttttatttaacttatatttccaaccgtctttaccttcatatttggcaaattcattaacctcaatatagtttggcagtaatgaagcaacaacatttcttttaatagattccttgtcaatgaaaacaccaccaattgagtgcataatcttgctttcatcagcagctgcaatttggaaagctttttgtgaacaaataactttcccaatatctatcagctctttgatatgagagacttgtgaatacaggcataattcttttgtttgaagctttttgagttttaaccttgatgttttcttgtgttaaattttgtttgacaacatcaacagcagtaacttcttcaaaaacaacaaacgcctgcagtaatttctgcagaaacaacattttgtggaacaacttctaattgagacatttgaactgaaactggtggttgtgaattagtttcattattggtgtagtcattgttgttaaaatttgcttcaataccaagattattgataatatattgaagctcttcatcagattgaatcaaagaattttcattagctggtaatattgaagattcctcaaatctagtttgattttgattttgaaaattggaagcagtattttcagcttccatattatcaagaaaagctagtgcttgatcaaaatcaagttcatttaactcatttgccagttcgtaatattcaccacctggagcaacttgagtcaatatcaaagccaaaacttgaatcaatcgagccttcatcaatattattgagagagttagaaacgttagtagcttctatttttttatgtttttccatcatttcttcacaaatctcatcaataagatcgatttcttcaagggttaaatcatcatcatcatttgacgaattggaagttttggaaggtagtattatttagggagaaaacagtattttctggagaagattcttcaaataaataatcaagtgattcatcatcagagaaaacaatagtagtagaagacatttttaaataaaaatttaagcaaaaagcaaatttaatagtaagctaacaaaaagcaaataagtgagaaattcagcaataaaaaaatgaaaatttaatgaaataaaaataagcaaagacaaaaacgagattgctattagggcggtcagtaaaacaagaggtctaactgctaaaagaggagaaagaaagaagtgaaggtaaagtgttaaaattaaatttcataaaagtggaaaagatgtctccttttatagttttccagttgttaacaaaacctgaaataattgatacttttgaataattgtaaaatttgttattgaaaatagctttagaatgcaaaaaatcagtctcgcttcccaatcgggaaatacgaattgcctatttgggtaaatggtcattttttgtgtcatgtcttctgttttttgaggtataatttcatataaagtgaagcaataaaatgaccacaaagaagaatagatgcatctagatcaacctaacttgcatgtaattacaatataaaaaccttctagaagcgatttcatgcaagtttgatgcattttgagatataattctaaattttctgctttttttctcgtatgaaaagtaaacaaaggactaaaaaaggtaggttgatttcaagaaaagggtctggtacagagtcttatttcaagataaaaaaattcatttaagaatgaaaccaattgagaagttttagctggagaagaaggaaaaagctgaaatgagatgaaatgaaaacaaaacgtaaaatatgaagataatactgctactaataaacccaaacgtattttactcgcatcaactactgaagtcttcctagctatattaaaacatacacccaacttaaacactagatgaatggtagcaaaccatcaaataaaaggattaaggtcgacgcagcgagcgatatacggatctcttctttttttccaatcattggctaatcaaattttataataattaatgcagcttaattgatgacattcttttcttcttattaacatcttcttattgttcagtgcaagtgatataaagaagcatatgatgatattaatctactagttttatttttcttttattttactgggtattatacaattttatggttataattgattaaacttaaagaatatcagcacattttgaaatacttcaattgttagcaccgtaaactcctgttttcatacacaaaattccccttggtttgtagatggaaacaagtgttccggtgctaccaaatgtaaggattgcactatatactgatatcaataacaataccatactaatgaaactgggctcgtcaccctataagaaaaagcaacttccacataaaattgaaaaaaatgcctgggccgtgctaagtattattgcatgcaaataatttaaggtgaagaaagactaaatgtaacgttgtagaatcatttttatatatcgttttttatatcatatagtatagtaattgtatatttctgaatatatcaatctattacatttccaaatattaatcttttctatttaggtttattcatttactaaataattaaaatactacggatttaagcacctttattaactaaaaaatatattatggaaagagaggaagatacgtcctctaagcagtcagaacaagttggaagtgatgaaactactgaattaaatgataaatcaactaagaataataatgattatttttccctacataaaataaataccgtataccctattcataacagcttaagtttatcatcggccttatcagcatcttcggaatctaatttatcaactgatcaaattctactccctaaatttgcttctgttagatcacctacaaacttaaacttctatttatcaccagtggtaacatctccatttgaaacattaaaggaagaatcatattcagcagagtttttaaaagccgcagcatcaaatacggatcatttaattgaaccatcctatccaagtattctgtatgatctagagaaaactgcttataatgtcaggaaagataaaaatatacataattattcatcaattttacctcatgattatttaaatatttcattagctgatgaaaacctcaagttgaatcaagatgatattctgtcttatataataaacgaatacactcttttagataaattgtatggtgaagattatagtgatgttatttacagttatattgttgagcataaaataaccaagaagagaaatgttataagatttagttgttctttatctattggagttcttgcaagattcacgaatagttaccatttatcatcaaatcataattctcgtttggttaaaaatggattcccttttttgatcgaatctataaaatggaattatactccaagaaccttcccaagtgatacaccacatatatttcattgtgagaaattagagctatttaataatcataattcaataatagcttattacccaatcgaagatgactttattcctctaaataaatttaaaattcaaatgaattcagaaaatatactaaaagtcattaaaataacaataaatttgttcaaagctttgaaaaatatacatcaatatggaataacaataaactcattaactcaaaccaacatctttatcaatcctaaaactttggacgtttcattaatggaatttgatttctctttttcatcatttcaagaacaattagcaactccttatagaagagcaaataaatcacaaactttaaattatttaccgtacactgcaccagaaaactttttagagttgtcacctgttgattttagagccgatttttacagtatcggtgcaataatttatacctttttaacaggcaaggttcataaattcaataacattttaaattccattgtttcattacttactttatcaaagcaacaattacatgaaataaatccattgattccagttgaattttccaaaattatttcaaagttaacatcaatagacccagatgcaagatactcatcattagatttcataattaatgatttatgcactttgtacactcaacttacatctacgattattgaacatgatagtattacaaaatctttgaaaagaatccctatagtcaccccatttaagatagttggtaggaattctgttacatccttcttaacatcacaattttctaaaaattcagttaaaacgtttacattaattggtgatactggtataggtaaaactgcaattttaaactcattaagattacctacattaatcaaaaaatcatttttcacactctgggaatgtcaagatttgacctattttgattccaaatttgaaacttttgatttaatattatctgcattaatcagagacattctagtaatggataaaaatgaaatcatgttttggcgagatattttaactggaatcaatgctgatttatcagtcctttttagaacagtccctgaactgaaaattttattaggaggtaaatataagcatatcaaaagatctaaatttgataaaatgttgcaaaagcaaaatctaagtcatcaatatattctaaggtgtgtttttgaattattcagtaaacacgcaggttgggttttggttattgagaatattcaagaattatcagaaactgaagcttctttattaaaagaactttaccatcatcttaaaaatgaattttcaaatggtgaattgaattttatgctattaacttcattctcaacaacgaatactcaagattttcaagataatgaaagagttccatcgtttttaaaggaaaatgtaatccagatagatcctttaacctttgaagagacccaaaaagttgttatgaattcattatatttatatgatagtcaattcttgtggaaaaaaattgatggaaaagaatccaaatattatcatgaacttgatgtatctcctaaaatgtcatgttctcgtaggaatatggttgagtcaattcatgcatatagtaaaggtataccattggttattaaagaaattataactcaaattcattttgttcaactagaatcaaaggaagctgttgatccagttgatgtttatcaaagatttatccaaaaatcacacccaatatcactcacaggtaattttaaactggattctatttatgatagtgttgctgcttatgatccaaaatcaatccaaattttgaaatatgcatcttgtatcgcatctggattatcctttaatatttacgatctttctattgtttcaaacatggatgtgtcagaactttatccagtactattcacaggaactattacttcagtattaacattttcatcaccagtttccaaactaccagtccatcttatcaacgataaaggtcttcttttaggtcaactatccttttcagagaagaaaaaattattgaaatgtactcgtttcaaattcatccatcaaactatcttgaacaattttgttgaatcaatgaaaaagaataatgaatttgaagaaactcatagattatgtggtttaagaatagataaatacctgaaatctcttatcaaagataataaattatcactttccaattatgattgttatttagttgcttaccattttatgaattcatataatgtatgtagagctgaggaatacgcaatatacagcaaaatgttaattactgcagcatggtgtgcttattcttcatatgaacatacaacggcattaaatttttttagaactgctcaagctatgacaaccgatccatcaattttcaaaggattaaaatggattgaaatccacatatatggattaaaacaacagcatcaaaaatgtattgatcttgcagatgaggcacttgaaaggtataagaatcctgaagatgttgctcaatttatgatcgctagaatgcaaagtctgagatcattagaaaaatgggaagaagcatatgatgcatgttttgatattttagaggtattaggttttgaattagatcttagaaatatgtcagaggaagatattgttcagtataccgaaacagttttgaaacctaaactcccgtcatctatttcagaaatcagaaatcttagaaaattaccaaatgttactaatttaaaagtattgcttacacaaatggcattggtagaattaaatcaattttcagtttatttagggaagccatatttgttaccattttgcaatttgctgaatttttcacttttcatggaacatggtaaatcattttattgttgcttaagtctgattattattgctagtattgatgctttatctaatgctaaaggtcttaagagagcacaagaatattgtaaattaggttttaatatgactaaatccaatagttttgaggcaaatgaactgtttttaatttcatttagatggtattgttcattgattggatcccttatagagccagttgttaaaatttcacactcctttgatatttcagttactaattctaaaattcaattattagaatctacattcaccaaggcgattattcttaaatttaagttacatatttggattacacaaggcttaacattaccaaaattgaaggagagaatgtttgttttgaaaaccacatttcaacctaaaaatgataaagttacaaatttatgataaagtttatgaagctgttgttggaattcttaacattataactggtgaattaagatacgaggactatattaaaaattttgatcatctggatgataacactttcaaatcttttcatatcagtttgatttataacaccaataaagcttttgcatgttatgttttaaaaaaatatgaacaaggtgccaatattgcaatcaataaaattttacctggatgtttgaatgaattggtttctattgaaataacatgggcacgttatgtttctgttattctttgctacaaggatagaatcagacgaattgaacaaaatgagttacaggatcaagaaactgttgataaaattgataagatgatgagtgatgttcttatattttttgaagagttatctacacttaatccatctgtgtttttgtgcatgtaccattctgttgatgcactatacaaggttatgaatgacaaaaattttcacaaattgatattctttcctcttttgaaacagctattgaagtttgttcaaattatcaaaattatttctttgaatcagtgattgccgaggaatgtgcaagatggttaacaaaggttagtagtcaaagtagattaccaaataaatatttcaaattggcttataatgcatatcacacttggggtttaatacaaaaaactcaacaactcgaggctgaattgggatcaattgttgactcatcattagacttacaatcacaattcaaattgagccaaaagtcaactaattctgaaattgtttttaaagacaagtatgcctatttaaacagtatgaaacatcaatcatcagttgcatctatggatttatcactttcacaaaattcagagagaagattaactccatctatagtatcagcatctcttaatgttggtgaagatatcaaatctgatttttccaaaacttcagactcaaaaggttattcaagtacttctaaatcagaagttgattcaactgaaatgtcgagctcattacatcttgctaaaagtgtgaatggagaagaaaaatattatgaagaaagtgcagatacaatggatgaagaatgggatagagatgttattatggatttaagtatcaaaatttctcaaagtaataatgttgaagatttattcaaaactcttttagtcttttccttgcattttattgatggtgaatatggttgtattattttaaattcagacgatggaactccctttattaaggcaatatgcttacaaaattatgaagttagattcttagaaagagaaatattatctctacgtgaagatttagcaccttcatatcttatcaaagattgtatgaccaaggatacttcaatttggagagattctgataaattttattttgatactacatatagagctagagagtcttattttgagaataatgattgtgaaaatgtcatttgtataccaatcagaggtggtgaatcaagagttattggtgcattgtatttagagaatcaaagaagatctgtttttgtagcaatctaaaaaaattgagttattagaatatatttcacttcaaacatatatctccattagtaaagttatgatgtttgagaaattagaaattgcaaaacatttagctgaagaggctactgcagataaggcaagttttttggccaatatgtcacatgaaattagaactccatttaattcgttaatgtcatgtgcaatctttttactagatacaaaattaacgaaatctcaaagaatgtatgttgaaacaatcaaaaattcagcattggtaacattaaatattattgatggaattttatcattttccaaattagaacacggatctttaacattaacatatgaaccatttgacataaatttatgtattgaagaatcaattcaattagttattgaacaaacattttcaaaaaatgttgaaattgttttcttagataatgcatccccattcaatattgtatacggtgatagaacaagaattattcaaattattatcaatttattaggtaatgccacaaagtttaccgataaagggtatattttaatcagctcaaatgttagtaaagttagtgattctagatttgaatttaaagtaattgttgaagatactggtattggtattgctgaaggcaataaatctaaaatttttcaattgtttaatcaattagatggatccagtaaaagagaacatggtggttcaggtttaggtttgacaatttctaaaaaaattgcagaacttaatgggaggtgatttagattatgacagtgaagaaaatgtgggaacgaaattttattttaaatttgttactaaaggtgaaagttcccgaggaaaggaataaatgtataccaggaatcaaggaattataaaataaaaatatttgataatagagaactgagtacaaaggcattggtcaataagattattaaatttggtggtattgaggagaatatcaaaacttatgaaaagtgttgaaaatattagcttccattgatgaagaagatagagaaactactaatattgtatttgttaatagtgaatcaataaaaaatgaagatgaaatgaaaaagtttagaagtttttttgagaacagtagaatagtatatgcaattgcatatggtattaatattccaagttatattgaagatgataatgaagataatgaagataataaagatgatgactaataaagatgatactgttgcagaaaccagctcaagtcaagatatttcacttgttaatgatatattattaacaccatttaaaagtgaaaaagtttttgaaattctaaaatcaggtaaggagatcagaaagattgataaaaaaaataaaaaagataaaatagataccaagcaaactaaatatggatttagaaaaggagaaatcaagtagacaaaattccagtggtggagacaacatcaaattagctgataattgcccacttaaaattttaattgcagaggataaccccattaataccaaagttgtaaaacttcaattaaagagacttggatatacatctgatcacgcaaaggatggtgtggaagtaatagaaatgattgcatcaaaggaagcaaagaatgaagagatgtatgatttggtgctaatggatttacaaatgcccagaaaagatggatttgaggcatcagcagatattagagcgaaatatggtgagagtattagaattgtggcattaagtgccaatgtgtatgcagaagaaaagaatagatgtgttgatataggtatgaatggatttttaaataaaccgttactgcccgaggcacttatatcccagttagaatcaacgtatagttggaaaatagataatatgtagttataaataatataaatatagtagtgtataataaatacttcctaattaggcaatgcgtaaataccagtaccctctcctgtttcatgttgaacataaatttccccattgggcagccctcttgtcctgaaaaaggtgaaaattggcttttttttctcagacgaggtaaggaatctaagcagcgcactgttatctgattcaattagagagagaattacaaaatctctgaatctaagttgacttctatatctcttgatttgtaatctgctcacatctaagtatactgaattgatatcagattatcatattataagatatattataaacagataatacattacattggaaactattaatataatctctaatttaatataccattaagaataatttatatcaatatcaaattatatcaaataccaagcattgaaaatatctaaatattcgaatattcgataaaaaaatcaaactttaaatatacaatatataaacaaataaattaaatatgggttcttttaataatactattaagtgtgtcgttgtcggtgatggtgcggttggtaaaacatgtttacttatctcatatacgagtaatcaatttcctgaagattatgttccaacagtttttgataattacgctgttactgttatgattggtgatgaaccatatacttttggattatttgatactgcaggtcaagaagattatgatagattaagaccattatcatatccacaaactgatattttccttatttgtttctcagttgttgttccttcatcatttgataacgttaaagaaaaatggttccctgaaatttcacatcatgctcctcatgttccatgtataatagttggtactcaagtagatttaagggatgatccaagtgttatctctaatttatcaagacaacatcaaagtccaataactgctcaacaaggtgaaagattagcgagagaattaagagctgttaaatatgatgaatgttctgctttaactcaattaggtttaaagagtttatttgatgatgcaattgttgcggcatttagaacctccagttattaaaaaatcaaagaaatgtacaattttataaagattgaactccacatttatattggctttctttacaaaaactaaacaaaaaaaaacattaaaaaatcaaaacattaaaatattgtacattatttgatgaatgatatcaaacatcaatcaaacagctatgtcaggttaatcaatttgtaactatttattttgaaaacagttgtttactttatacatttttccttctttttatctttttataaaacattttttatcgattatattttcacttcaaagaaaacaaatctttttctatttattggtatactccaactagtgtctcccatactatacctatgtgtataatgattccactgtggattataacttcgttaacaatagacatatctctcactgtccgggtaacttttcagtctattttcgcatttcgtgaattttttatttcgtaacatgaaaaagtgaattttgttaacaaactacacttggaaaggagaagctgatttaacttttacatcgattttgattctattggattgtaatcgtgttcaaataaacaaacttatatatagatatacatttagattatcatattaactatgttttcaaatgcacgttcagagaccttatttttaggtggtgaaaaactaagtggtgacgatgttcgtaatcaaaatgttttagcaactcaagcagttgcaaatgttgttaaatcatcattaggtccagttggattggataaaatgcttgttgatgatattggtgatgttacagtcacaaatgatggtgcaacaattttatctttattagatgttcaacatcctgcaggtaaaattttagttgaattagctcatcaacaagacagagaagttggtgatggtacaacatcagttgttatcattgcatctgaattattgaaaagagctaatgaattagttaaaactaaattacatccaacaacaattatttcaggttatagattagccttaaaggaagcaataagatttattaatgaagttttgaagtcaacctgttgaatcattaggtaaggaaactctaataaatattgctaaaacttcaatgtcaagtaaaattattggacctgattctgattttttctctaaaatggttgttgatacaatgttatcagttaaaacaactaataatgcaggtgaatccaaatatcctgttaaagcagttaatatattaaaggctacatggtaaatcatcaaaggaatctgtattagttgatggttatgcattaaattgtacagttgcatcacaagcaatgttgaaatccgttaaaaatgcgaaaattgcatgtttagatattaatttacaaaaagcgaaaatggcacttggagttcaaataaatattgatgatcctgaacaattagaagaaattagaaaaagagaatatggtattgttattgagagagttagaatgattattgcatcaggtgcaaatgttgttttaacaactaaaggtattgatgatttatgtttaaaaggagtttgttgaaaataaagttatggcagttagacgttgtaaaaaggaagatttaaagagaattgcaagagctagtggtgcaacattgatcagtaatttatctaatatggaaggtgaagaaacttttgaatcaagtttattaggatttgcagatgaagttgttcaagaaaaatattcagatgatgaatgtatacttataaaaagaccaaagaaacattcagcagcatcaatagtattaagaggtccaaatgattattcattagatgaaatggagagatcaattcatgattcattatgtgttgttaagagaactttagagagtggtgaagttgtaccaggtggtggagcagttgaagttgcattaagtatatttttagaaaattttgcaacaactgttggatcaagggaacaacttgcaattgcagaatttgcaaatgcattagttagtaattccaaaaacattagcagttaatgcagcaaaagatgcaagtgatcttatagcaaaacttagatcatatcatgcagcttcacaacaagtttcagatgctgatattaaaagaaaaaattataaaaattatggacttgatttaattaatggtaaagttgttaatgaagttacaaatggtgttcttgaaccaacagtttctaaaattaaatcacttaaatctgcattagaggcatgtgttgcaattttaagaattgatacaatgattactgtagatcctgagcctccaaaggaagatcctcatggtcattaaatataggatagtagtttataatatcgtttaataaaatattattagtaaaattaatactttaattcgacctgtcgaagtttttatttgatacatctatcaataaactatataaaatacaaactataattattattagaaaaaataaagctattatgtttagctattgttcagcattatcattactattttgaaattcttgaaggaccttcatttggatcaacttcgtaaaattcttgatgttgaacttttttcagttaattcgatatcttcagcattaatattttgttcaatattttcattttttgtctttggttttggttcaggtccaaaaagtgtaactaataaaacgaatgcaaaaacacaaccaataaaaattgccataactttagcataatcataaattggtttaccttgaggcgaagtaattgggaaactttcaccaattgttgtttcaattgtagatgaagcagaagatgctaaattacctaattgataagcaataccaacgacgattgctttgaaatttggtggtgccatttctgataaataaactggaacaacacccatagcaccttgaacaaagaattgtaaccaaaaagcacctgcattgatatttgcattaccaacaaaagcccaagggtaaatcattgcaccaccaccaatacaaaaacaaataattgccaatcttctaccgataaaattagatgaatgaccgacaatgataccaccaataaaggcaccaatatttgcaacacaattagtaacagttgaagcattttcagaaaattcatatctaacggttaataaagttgggtataaatcttgggaaccatgagacatgaaactaaaacctgacatgaataaaatcatataaattaacattaaccaataaactttgagtgatgctttagccttttccttgaaggaaggttgataaataccgtgttctctattatacttttcaatttcctttgttctcataaataatttagtttcaggtaatgataatctaaaacatgtaataagaaaacaaacacctgcaccaaaccaaaaaagagctctccatttttgtttaacattatcagcaattgctcttttaaaaacaacagctaaaatataaccaaaagcataaccttgttgtaagaaaccggaaatgaaaccttttgcttcagcaggacaatcatctaaagctgttgcagctgcactaccgtagataccacctaacgtaataccaaataaagctctaacacctaagaattgttgataatttttaacaaaaccagtaccaatttccaaaatacaaacacagaataaattaataactaatgaaacttttctaccatatttatcaccaataaaaccaaataatataccaccgacagatcttaacataagaacgacagtaataccccaagtaatatctttaacagttttatcgaaatccttagctaattgagtagcattgagagaaactgaaaagaaatcataagcatccctaagaccaagccaggaaagcagataaaatcatcaaccattgcttaaaaccaatcattctaagaccgggtaaaggattaagtaaatgtttctttgcagcaattgattgttttgatgggaataattgtgtaaatctagttataaaataaattttaaaattttcccaattaatgacaggtttatcaatcatttcctctaaaccattattaatcattaaattttgatcttcttcatcacttttaaaagtttgaacagaatctgcaattgatcttgtttcccaattatcttgttgattcattattaaattatttgaagaatcaaagaggaaatctagtaaccaaaaaagtattaaaatataagttcaagatattttcagtaaaaattcaaacagttgtacatatcaagggctttatataagataaacattacgttgatctatgattcaccaatatcaaaagtaataaagtaattgtttttaacataattgattgtggggaaatgggatccccctaggataaacggaaaccacctataactactatactaaatgtaatacacatcaagtattgttattacaatagaaaccttattttaatcaatcatcataattccatataatataaaatctgctatgtaaaaattcacgttatgatgaaaacctagggcggttctccgcctagaatcggtgatttctcactcggaatttctaacttttcccggcccttctccgccctctctattatcgatgtttccgcctttttccgcttgtatctatcttcctcattaaacttactgaataatattatactccccttgtattcataccccacattttaatatactaaaatcctgtaaattgataggcaattatcggtgaagataccacacttgtgtgaagtatcgtagaaattagggaaataaacattctccgtatcggagatcctttataatagtaaatgcactaaaaataccactctattaattaatctattggttattaattagtactaaaaataccaagacaataatataaattttagatgaagtcacggatttttttgacttttgatttctctaaattttcgttattgttttttatcagcaatggttataatttgtttggataattatagtttacttatcctttatagcattggttgagtcactattgtctaaattgatctaattaactttttctcaattgtcttctttgttacgttttctagctcctggtttttgctatattaaaagtattttctggtgtttcttcttatgactactcttaatcggttttacgtatgcaattttctcttatggtgtagtgaatataacaatttgatatcagtcaataaaatacttcaatttcctagttataaatcgaattgtcagtttagtaactacgagtataagtcattactctatgatattactaatactgagcctccaaacaaattaaattgattacgtaaccaactttaattttttcttaaatctgttcggaacgagtttttccttaaggtcactaaacaatttttatacgaccatttcttaataatttttttaggattttttgtcggaacgacgagatttatctaaaataatatactgtttcaaatcaaaagcttaaaatttaaacgtttacaaggctttgatatcatttagtgggcttaaaacattcatataatcaatcaaataattgaatataagtagagatagaactctataatcacttgctagtaaatattacaaaaaggaaaaagaaatttaaaaaaaatttacaccccatataaaactttaaagctcatctaaataaaatttttgatatgacgaataatattgatgaacataatgctaaaattgctaaaaaagcaactggtaaaagaaaatttcataaaaagagtaggaaaggttgttcaacttgtaagaaaagaagagttaaatgtgatgaaggtcgacctatttgtggtaattgtgaaagaatgaatattgattgtcattatttgatatctgataatttaccattaaattcaactccacaaactaatgatgaatcttccaatatttcacctcctccaattaaaaaggaaattaaagttgaatttgaaaataactttaataatgtaaatcaagttgatacaccagtttcaactccaacaaatacaaatgataatatctcaaatgattttaataaattttcattaccgataaccccattattacaaaatgctattctatcagatcaacaaattcatcaacaaaacaatacattgtctccaatatcacaatttttacaacaactaccgcaatcacctgtaaataattcagcggctcaaattggtatgcaatttttaaatagtttcccacctgaaatgcaagtgaaattgttccaacagtttcaacaattaccccctgataaacaacaagaattatatcaaagtttaccaatgagtagaccttcatctgaaaatataactaataataccaatcctaatgacaataaaaacaaaaataataccaccactaataataacagtaataacaacaacaatgattcagttatctgatctaataagtaattttttacctgataaatcatttacaaaaccaatattaacatcaaataccactccaacaccggaagaattagcagctcaatataaacaacgttctcaaagttcacaaaaattaccaatacccttatcttctgaacaatctaaccgtaatggaccttcattatcacctgattcaataaggtcaccattacctccaatgccaaataattcaaattcctcatcaaacaccggttcattatctgatttaaatatgttagatttaagactaatgtatcattatactacaaaagtttggccaacaattacagatgctggaatttcagattctaaaatttggtcagatgatataccaatgttagcatttaaatatccatttttaatgcattcagttttagcattttcagctactcatttatcaagaaatgaaagaggtttagatcaatgtgttacatgtcatagagctgaagctttaagattattaagagaagcagttttagaaatgtcacctgaaaatactgatgcattagttgcagctgctttgattttaattatggattcattagctaatgcttcattaccaacttcaagttcaattaaatcattacctgcatctgcttggattttccatgttaaaggtgctgcaacaattttaacagctgtttggcctttaagtgaaaaatctagattttataaatttatttcagttgatttaggtgatttaggtgaaattggttatgatttaattagtggagaattagcaaatacttcagatagtaatgaaaattcaagaagtaatagtttgtcaagaaatgaaaagaaaaataatatatcatcctcagataatacaattaatacagttgaaaaaatagctgcattagctgcaaagccaataatgaaaaattccaaacaaaaattctcttcaattaaatgttttgatgatactatttctgatatgttcccagtacccttgaattcgccctatttcccaacattagcatatatggcaaaacttcataatgaaaggaataaatctgattttatattaagaatttttgctttcccagcattattagataaaagatttttaggtttattaatcaattgtgacttatctgcaatgagaataatgagatgctactataaattactgagaaattttactgaagaaatgaaagaaaaagtttggttccttgaaggtgtaagtactgtattaccagcggatgttgatcaatacgctggtggtggtggtatgcatatgatgctggattttcttggtggtccgtccactattgatgatgatgggaatggtgaaaattatgttgcaaaatctgctgctcaatctggtttattggatacaaataatttaccaagtgcttcaatgtcagaatctttgggtcttgatgatggtctgaatcatgatattgattaataaaaaagaatcatccggttaatttatatagcaaaaaagtttataaaatgcaacaaaaaatatgaaaataatggttaataataatgaagaataataaattaatttaaattatatgtagaaagatcaaaaattcctctaaattttaactctttgaataccatcactgtctcttataacaccaagctctaataatttggcaaatgcaagtgcaaattgttcatcaaaatattttgcatcatttgcaaaaatttcaacccatcttttaaattctggatatcttaataattcaacatcagtattcaacatcattaaagatttatcatcattataatactgctcaattcccgtttcaggtacaacacctaaactccagttttcttccaataaaactttaaaaaaatcattatcccaactaaatggatttctcgtccaaataccattaaatccactatatcttgaatgacatcctccaataccgtgaccaccacctataagagcaactgtttcttgagcattaaaacctaatctattatagaaaacttcctgaatatgagaccagtcctcggtagcaattggcaatctacccattggaggaactttatttagcatcgggacaatctgatcttcctggtttccattcaacttttggaccaccaattgcttcaatagcaacaacaccggctaatgtatataaatctgcaaaggtaatccaaggaaattgttgttgaacttggtctaaataacttttggaagcagtaagacctgtattacctaaatcattaaactcttgtgcaaatctcattgtaccaccacttgagccaccagttccagatgcactatcataatgtgcacaacaatgccatgtaaatctaatcatatttggaccaatagttccctcaggtttatatgatggttgtggaataatattcttaattgcttgggaaacaagatcatatctaccataagttacatggatctttgtattgatctgtctttggtgtagcctttctttttatttttattttataaaatatatttcttgatgagctgtttgaaacatttttatcattttggatatcttcaatatcatctttatcttttttggtaatttcttcaatttcttgcctttcagtcttttcctttgagttggtttgttcgcatgcttgttgatttgtaaataagcctgggaacattggacagccagaagttgatgccttttggaaagttggtgaatttggttttgattctaaagtctttactattgaataaggttttggcacaaactccttttcattaacactactttttacaccatcattattttttgcagaatttaagtacttagcagttgtaattgaaggatatggattataagagtaagaacgacgtgatccattgaaaatattaataggggaatgaaccacaaatctatcatagtaatacccagttctaaaccacattctcatataatattgattaatatttgttggtggatcaaacatatctcttacattatcattaacaggtaattccttatttctgattctacttttattattaaattttctttgttgataagttatttggaaggtatctttatcatgttccgtttcctgtaaaacataaaaaaggttataataataaacaaaatacaatctacagtaagataatgtgttcattattaagtatcttaaagtttgtaatgttgtttgaacatatgagtacggtaaaaaagccaatctccccaatggagagagtgtatcagttacagacatataacaagtttccaatgcgtccattgttaaagtctttacactatatgggatacaaaaaaagatacaaagagatcgagaaagaagtgatgataactaactggggcaaaagagggagcttttgttctatttttataggggaaaaatggtagcaaaactgatttcggggatacactgtcatgaaaatgtcgccggagataaaatttaccctttctacatttatttatcgaagtttatccaatgatttcttgtgaatttccaattaaaatttttatgttatttgttatatatacatgtttgtaaattagtgaatataaaaaatgagtttatagtctatatagatgggagtgaaaagtgtgcattctaccaaggtgattatttagaattaataacaacagtaacggttgcatctttaccttcattttgtaattgtaagaagtaagttcctaatttttgtatagattgtaattcttcacctgcttcatttctaagggtgaaaacggaattttcactaccaaagaatttagaaactgtgttagtttctctaatatatcttgacaaagtaccttcgatattattaataatgtatttcttatccattttggaaattagtgagttatccttagtattaacaactaaaattaatttctttggtaatttagcaaatattaaatctagttcagcattattaagaccttcaacatcaatagctaataattcatcaagatcaagtagtttattactttctttctttgatttttcaatttcatccttgagaattggattgagttttggtttcttttccttctttgcttgttgttgttgtgcttttaaagctgctaaagctgaagctgcagcttgttttgttactattggaattgcaggttctgcatttttataattcatatagatagcaccattgtttggataaagtttatttgccatagctgatgctttaacagcaacaatttgacctttaacaccaatacctgggaaatctttaagtaattgaacatcaattctatttttctttgattgagcggtgtatcgtataccagtttttgcaagtccgcaatcaacagcggaaaggacatgtgatgatgatctagtgaacatgtctggtatatgtagagaacgggttgtctatctaaaataaaccagagaaaccaatattgattgctacttcatgttgaagattcaattcatgaaggatgaaaaatatacatgaaaatttcatcaccttaattttggcgggtaactttttcaaatttgatgttgattcataaactgatctctctacatttctacatcgttacattatgaacagtattatattacaaaaatagtatctctctataaatggttagatcagaaacgagcttttctagcacgaccagtaaacttagaatctttacgaacttccttcccacgtttttcattaagaatcttcttacgtttgatatattctttcttagtttccattgccttaagacgtttctttgaaactttagttaatttttgagctgcaacttgtttaccattcattttttcaacttccataccatcaacattcaatggtctagctgaagaacctgcttgtaaaactaaataatgttttctatttttccttgattcaggatcatcaatcacaacaccacattggaaacctgcaactttagcagcactcgttatttgaactgtttgatcttcatttgcaggataaaattgtccaacgaatttacctccttttcttaatgatgaatataatgtattgaaaaatctagctaatctaaattttggttcatttgtattagtatctgcattacacaaccattgaatagcagaaattgaaatagctgcatcaaaagtacctgcacgaaatggtactccacatcccatatcagccaaaaacatatcaccatcaatatctctatcgattgcggtcgctaacatatcagctgaaatatccataccaatccaaacatgaccttcttcagttaaaatttccccagataatccagatccacatccaacatccaaaagaaaatgtgatttaccctcttctaaattcaataaatctaatgctcttaatgtcattttagcttgaatatgttgaacacgagatgatgcggtatatttacgagattcaatatcattataaaaaatctccggtggtgctatttgttctggtctagacatctctcaataaaagcagcagtagctgaaaagaaatcgtagaagatctggacagggggatcaaagaaaagaaaagtctttccaaaaggtaatgattaattatgaaataaaaatattttcttcttcccaaagaggtaataagagatagcaaaaaaataaattattacgtaagaaaaggtattaataaaatgtagcctgattgatggctcgggtggtttgaggactggtgatgctttcttcaatttaaatattcatttaactctttctttaaactaattgtacctcatctgatatatctaataatcaaataattacatcccacaaatagagaaaatcaaatatgagtggtgggctaccattgaagaagaaactttcagagaatactctaaatcgtacaactaatggatttaaaaggtacaatataatggaaaataatacaatcaaaagcacatcttcatcggatgataatccggatattgatcacgattatttaaaattacctatggatttaccatctggtagaaaatctcttttaattgataatgaatatgaatcatcagatgaaagttctcaggggcaaattggaaacggtgatgatagtatagatatagccgtgaaattgactgaggatacagataagaataataatgaagattcaaatttacgccaacgggtacctacacagcctaacctagataatgttaaaatacctacaactacttccgctaaattagttttcaaacatgttttaagtagtaaagtaaaatttagtagaaacggtgaaatgagatctaattttaatgatttaaatttcttaccaagagaaactatttttgatagggaaattcattttggtacaaaattttatggattttatgttgctatttggattatgattgcatttttcggtttgaatgttttaattgggtatcatcttgatcatggaagtatctttggttctgaaattatgaaattaatgttaaaagatatttggaaagttgcattgatggatttaggaatgtatttatcaatgtattttgcagttattattcagttagcaataaagcataaattaattaaatggaaatatattggatttacaattgcaagtatttatgaaattttattattgattttaccgttatattattcagataaattggatttcccatggattgcacaaatctttattatgttacattcagttgttatgttaatgaaagttcattcatattcattctttaatggttatttatgggaaattgttaatgaattggaattttcaacaatttttatagacaagaaagatgttttaaatgataatattgtaattgcgttaaaaaattcaatagaattttgtaaatttgagattaaatcacaagatttcccaaataatattaatttcaagaattttttcaattattcaatgttcccagttttggtttatcaaaatgaatatccaagaaataaaagaattagaaaaagttatttattaagtaaaatacttggtatttttggagttatcttgttaatgattacagttgcacaatatagaatttatccaattgtaatgaaatgtctttatttacagaaaaatgaaactttttggtttagattaaaaaattatccatttattttaattgaatttattccaccatttctatgcatttatctattggtattttatttaatttgggaattaattttaaatgcaattgctgaattatcgagatttgcagacagagaattttatagatattggtggaattcaattgattggaatgaatatgcaagagattggaatgtaccagtacataaatttttgttaagacatgtttatcattcatcaatttcagcatttaaagtaccgaaaacattagcaacatttttaacatttttcttaagttcaattatacatgaattatcaatgtatgttatatttaaaaagattagattttatttactattattacaaatgagtcaattagttttagtacaagtttctaaaactaaatggatgaaggataagtatattttgggtaattgtatattttggtttggtattgtttttggcccaagtttgatgtgtactatgtacctcgtattctagaatagtatagtataatatggtataatttaaaataaactagactaacggtaaatcatttcaaaaggtcttgtatcattaaaacaagatctgaagacttcatctactatttcatttgcatgatccatatctttacattttggatgaccaacaacgcttaaagcagctctacgtttaacacaagtttgatgaccttttgacattttcatcatacctaaattttttttaaattctgttaaaattgcacattcaccacttaaacttgcagcacgaatttcactacaagcatgatgttttaaatccatccaatcaactttaaatcttatattatcataccaatgaactaattcatgtgataaagtatcatttagaacccatttatcactaatataatttgcacataattgaatacctaaatcaggatgaaaaccacctaattttggatcatcacaaatttgacagttgattttctttggtgaaacataaccaccagattgtttaatttgatcaaacatgaatctaactgatggtgaataattaatcatccaagctttatattcatcacattttttacaaagttcctcttgcttttcaggtgataaagcttttgaagggggtattatctcaataggtttttcattattttgttcagacattatagggagtatctatttacagcttgatctgatgaagaactactacatcgattttatttcacagttaaatcaaattggtaataatcatgcaagtctagagtatttaagtgaaaaattaaattgtagcgacgtatcgtcccaaaaataaaaatattttttttttttcattttccagtgcatgaaattttataaatttttaaagaaaatttgttaaatcattgaaagaaagaaagaaagaacgaaagaatatcaactaaacacaacaagacaatatgtccggtaatatttgggttgcagcagcagatggtagattagatattgttgaaaaattaatttcattaggagaaaatactgcaaattcaagagatcccaatggatttacaccaattcatgcagctgcatcatatggacatattaatataattgaatatttaatcaataatggaggagatataaatattcaagataatgatggtgatacaccattacatcattgtgaaaatttggaaattattaaattattaattaataaatataatgcagattataagattaagaataatgaaggattaaatgttaaggaatattttattgatgaaggcgaattccctgatatcattgcattcttacaaagtttagatggtgagagtggaagtaatacaaatgataataatgctggtgtgataaatcaaggacaagatagattagtgttaccaaatggagaagaaattaaagcattcttaagtgataatattgatagtataacgggtaatgttgatgatgttaatgacaatacaccagaaatgattgaacgtcgtaaagaagttgaaagaatactgtcaaacacagatttatcagaaattgagagagatgaacagttacgtaactatgttcttaacattgtttcctctaacatgggcaagttaagggatgatctcagtggtggaagtgttgataatggtgataatagtagcaataaaagacgacattaatataatagctgtatctggttacataataatagtaaaactgtggcggaagttttaccgcttgtgttgtgtggctttataaggaaatttgatttaaatacttatagatctgacatcaagatttggtttttgtaaatttataaacttataatcatcaaacaacccaatgacaaaggcggagattcaattgtcaccagagattttatctcttgtatcagataaaactaaagtgagaaatccagttcatttcagagattgtattccaaatgccgatcatattaagaaacattcaagtccaattgctttaactggtggtatgccaaatcatgggttttttccaattgaaaatttacatgtaaaattaaaagaaaaaccttttagttcaaataatttgattgaatcttcaattccaacaattgctaaagattcacaattacaaactgatattaaaacttctttacaatattctgaaactggtggtttacctccattaattaaacaaattcgtcaattcgtttcaagagttgttaaaccaaattataattcatgggatgtaattgcctctcttggtggttccgatggtattaataaatctttagaattgtttattgatcctggtgataccgtattatttgaagaattcacatttactccaattataaatattttaaaggaaaagggtggtatacctgttccaattaccttaaaagaaatcttccttaagaatacaactgaattaaattatattaatgaacttgaaaatttattggaaaattggtcaactttaaaacctgatttaaaattcccaaaagttttatatacaattccaagtggtcataatccaacaggtttatcacaaactttagatcataagaaaaaagtttatgcattagctgaaaaatttaattttataattattgaagatgaaccttatgcttatcttaactataaatctttccaaaacaataaaattgagttaaatcaatcaaatgatgaatatatcaatgatttaataccttcatatacaactttagatacctcaggtagagtaattagagttgaaactttctcaaaaatatttgcaccaggtttaagattaggttatattgttgctcataaagatttaattaataaattattgaaagcttctgaagttttaactaaatcaccaaatggttattcacaattgatattaaataatgcaattttatcatatggtggtattgaaggttggattaaatggattattggtgttagagattcttatttaactagaaaaaatacatttattaataatttattaaattcaaatgcttcaaagaaaggttatataacaccaattgatccatcttgtggtatgtttgtttcaataattattaatattgaaaatcatccaaattttaaaaataaaccagaagattataaagatttaatggatcaactttacttaaagggtgttgaatatggtgttaccttcgtcttaggtcatgcaatgagtgttgattattcttattcttcttcaagaactaatttcgtacgtgctgctatctcttatgttgaaactgatgatgttttagttgaagctgcaaagagaactaatgatgcagttgttgatttttttgaaagttaattaatattgtaagttaagggtatatttattgttttttagtttataaacgtactatttacatctaatgtaatggtatttaatgttcattgttgtcgccgacgacattctcttcctcttcatcctcgtcttcttcatcttcttcttcgttcatctcaattaataatgatccattaggccataattcattgactttattcaattcctttaattcaggctctaattttaacctaggcattggtgaaactaaatcaaaattaatctttaattgggaatttagttcatcaatattatcaatatttacaaatttgaattcatactttgaaaaatattctaaaagttcatcttcagattcaatcgtgctcaaatcaatacctccatcgtcttccgatatacaatcaaaatctttatcgattaataatttatcaatcaaatgtttagaggcaacatacatgaaaatatccaataatgtctcatttttcaaaaacttcctgataaatctattaccattttgacttctaaattggattgtcgtatattctcccttcgtaaatttagttgaatcacgcttatagtgattattaatataattaatcaatatctctgaattctgatatttaattgcttgcaatttattttgcttttcaataattttggcaactttctaattcttcttgcctctttaattgttccttcagttcttgattttgtttatccttcaataatgattcttgatatgctagatcttgttgttctcttaaaattcttgcaaaatccatttcttgtttatcaaatctttgagagattagttgcggttcatatttagatacaattctatctaattttttgcagattttagttgttgatttttcacttttcaaatgaatggcaagtttagaatattttgaaacaatggaaaattcaggagttgataatccagttaatgatacattggcaatgagtgacagatatggtaattgcattgctttatatgttttagcaacttcaaatggttcaggataacaaatatctcctacatataacacaatatcatatttctttatgaagttaataaatatttcatctgtcaacatatcgacaataagtttttcagttgatggtgattttgaattaaataataaaacgcataaccatttaaaattggatcttgcctcttcatatgcttcgttaaattctcctttaaaaataggtaattctaatttctccaattttcccttctcttcctcttgtccattaaatgctttctcagttatatattcgtcgattttatatccactgacttcctcgactgtgttgtagattggaccagccgggaaaacgttatcactatcatcatcaccaaaacctaaaatccttaataatccaggggcaaagttacctaataacttattcaaataataaccagttaagaacaaaaactttggcattaacattaataagaatattatagatgtaagaaatttacttctcttaactgtaactgtatcttttttcagtaatcctaattgaaacttccatttattactaattggcattgcacgttgaagtttaggcagcacggtatcagtaaataagaagttttctaatggaaggggaattgaaccggtattaccaataaagtcagttgacataaatggatcattattactcattatcggattaaagttattgttacctaaattactattaattgaatctgaagtgaataaaggttcatttaaactggaattggtagttgttgctgtgtttgaaacttcattaaaaagttgtgggaaatcattatcaaaatatcttgctaatgcagtttccagattccaattacagacattaagtaacctctcaactttttcaccttctgtttcatcatcaaaatgagttatttctcggaattgatccaatacttgttgttccatgacttgttaatttaattacaatatcaatacactgtgtgggactgtacaatggaaagatatataaataaaagaaagaaaagtgtatagcattaactagaactgattcctacaattttgccactagaaatttgaaagaccctcaaaatttcaacatctcctcgcaactaccctcaccatctccttatctacccttaccaccttcttaacatgtttaaaacatcgaaatgagagaaacttctctcaatatcgttgtttataacgtatagtggggactgatagatcatattataatagtaaattgaatactggtttataatgtataatggggactgatggatcatattataattatattaaaatcgtatattgaatactggaactacgtgttgtgagtaataaatgattcttagtctaatcaattgtgtctaattgaaattgtagacttataaagtacataatgacaagtcaaattgatctcaattggactgaataaggatagaaattaagatagaatgtcctaaattgttgttgttttaaatatatagtaaactgatggtaaagaaaagaataaaaatgaaagtctgttttatactgcggaacaaatgaaaccagagtttattaaagctaaaatgatgggatagtcaataatgaaaatgacagttttgaaatatatttcagtgttttgattaacggttatcatcatgatcatagcaaagttttaaaggtacgtttttttttatattttatttttataattatattgttacattgaaaatttatgtatttgttcatttttgaaaaaaaccattaaaaaaggaaagatagtattattgttttttttttaatttgtttgattatatttaaatttagaatctacctggggatctatctctgttgaattctctatcacctgaataatctcccatttcatctctacttgatctgtaatcatttcttggaggtgggggaccatctctaaaatctgggcctggagctggtggcatacctatattcagatgggccacctggtggacctcttggtgggtaatcacctcttggaggatagtcaccccttggagggaagtcgcctcttggtgggaaatcacctcttggtagcgtaaccacctcttggtgcaaaacctcctcttggagcataaccacctcttggaacaaatccacctctacctcttggcatgaaaccacctctacctcttggcatataacctcctcttggcatgtatccacctcttggtgcataaccacctcttggtagcatatgaatctctataaccaccaggtggaccataattatcgtaaggacccattggtggacctctgaaaccacctctaccaccatagaatccacctctacccataccaccacgatggaaaccaccacggccacggccacgagtaatttgtcttgaagcagatgcaatatatggtgaaagatcttcttcagctaaaatttgtgtatccttaaatttagtttcattaattgaattaattgcagtttctaattcttctctagttgcaaattctaaatgacaaatagttggttcttcatgaggaatacgaacaaaagttggttgaacatggatttcttcacgaaggaaatccttgaaatcttgccatgaagtgtttaatggtaaactactaaccttaactctattttcacctttctttgcatattctggcttatgcttagcaaattcaacttgtaatggttcaccttggaaagttttttcagctaattccttaaatgccttttcagcaatttcagcagtttcaaattcaacaaatgcgtaacctggcattaatctgaagttcctttaatgcaccacattcagcaaagaatccttcaacttcttcgtgtttagcttgactgttaattggtctaacaaaaagttggactttagaatattcactttccatttctagttgattaattagttgataagttatagagagtgctcttgtataacagagaagaaacaaacagtaataagcaacagtattaatttgccaccaaacattgaaaaagtgggaaaaaacacttcccgcactgcaaaaactgctacaaaaatggacaacccctgcgaatggcgggtaacttatttttagatacacttgcagtgggcttatcacttctattaacattattagatgaggatatgatgattgtatggctaaattatcacacattaggtaactgtaggcttgacttttcagcaatttccgttttgtataagtattcttcattggtaattgactattggtaattgataaattatagtttatataggtaatttaacaatagattcacctattatcattgttctcattttttgtacttcaacatgaaatcgttccttaatgacacttccaaatatatttccccagatccccggatttctataactaacggaacttccgtactaatggatttggcagcaaacaatatctacaatggcaaaagacgtagcggttgctttaactcctcgtaaagcaactactctacaatctgtacctacgctgaaatcaaattcaactagttcatatagaaataatgataataatgatactaatgggaatgggaattttgatttgctgaatgcttcacaaagccaaatagatgaaacatccattgaggaagagtttcgaaagattaagtaaaattgatctatcctatttaactttgttcaggaaaagttccaaattttcaagtattggattcaatcatttctttttatcacaagaattaaagtgtgatgacacttttactaagtattaatgggtttaataatcacaaaaatggtcaaactgttaacaattcagaaaacgttcttcctggtatggataaaaagttaaataataataccccatcaattacatcagatgaaacgaattctttatcaagtgatttacaaaggaataaaagtgtaatgacaatgaatactgttaagtccaatggtacaagcaataccaaatcttcggaagctcatgctatttacaatctctcgtttagtttagatggaaaatatttagcatctgctggtgctgatggtcttataagagtttgggggctcatcacctcagaaatggatagacgtgaacactacaataagtatgatcaattaaaccattcaaatattcattctgctgttaaacaaacttctaggaaatctttcatagatacagcttttgatgacactatcaatgatataacttcaattctgaatgtccctgaaatgaaagcatcagtttccagatctagaagaaatactttaatctcaaatgaaagtgatgcaagtagtaatataaatcatgggcttgatcatgaaaatgaatcatcaccagcaaaggataatgtttatgcacctgtgtttaaaacaaaacctgtcaaaatattctatcatgataaaacaattaattccttagattggtcaaaaaacaatttcttgatcagttcatcagatgatggaacagttaaattatggcatgttgatagagctgattgtttacaaacttataaatttgattgtgtggtaacatgtgctcagtttcataaacttgatgatagattttttgttgcttctcaatggaatggtagactggttctgttgtccattttagaaaaggaaatcatatttgaaattaatctgaataaatcaatcacatgtattgaattctctccggaaagtgataaaatttttgtgggttgtgatgctggatatatcttctctgtgatattggataaaaaaggatttaaaatagaagatgattatcaattgaagaaaaaaaaatctgcacatcgaattactggtattaaatgttattatgataattctaaatctccaaaatcatttttatcttcaaccccagcttataaacatagaacagatatagcagctaagagtgaaacaataaaaatgttgataacatcaaatgattctaaatgtagattaattaattacactggaagatttctagaagtgaaatattctggtttcattaataaatattcaagtatttcatcatcccttaatgaagatcacacacatttgatatcaggcagtgaagatggctggacctatatatggcaaatttattctgacaaaaaaaataaaattgataatgaaaagaaaatgcttaacaaggcacattttgatatattaaatttactcaaggatgataaatcaatcattgataataaatattatggatctttccatagtaataataatagatgtaacgtatcaatatttgcaccaagagcagcatctaaattactagaactaagtaatgatccattatttgacttaaaacataaatattcatacgcgttacaggaggcacatgttaaagactcagaagttgatgatttgacaactgctattattgttacagcggataattcaggtaagattaaagtcttcagaagagactttgcacattatgttagaaaaggtttacaaaataaaaaagttcaacaaattattgaaaataaacttacaaacacagttaataataattctaacaaaaaagtgcttaatagaaatactttggttatacctgattatgaagcaacaccaatgaatataagagatacaatgacttctgtttattctgatattaattctagaggtagaggagatagtggaatagtcaaacctgcgaacaaatttgcagttgaatctataaatgaaaatcgtggagaagaatctgattacttcaatggtgatcataaattcaatagtgcacaacctactagacctcaagtcgtaccacaaattactattgataatatacatacaaatgctaataggagttctggaatcagtgctagtggctctgtacaaaatatagatgatgaacttaaacagttaatattggaaacaccggatattggtatggtacattcagttgaacaaaagcagcattcaagatcttcatcacctatggggaaaaacttataacaaataattaattaaataagtgtaaataactaatttaaatatatcaaaatctaatataaaacttttggttggtaatcaccctttaattcttcatagaaaacgtcagtacattcaactaaaccagtttcggcaacatattctgaccaatgattaatcatttcttttagtagttcaggtttttcctctgataaatcattagtctcacctggatcaacttctaaattgaatagttgccacttatctggacccattggtttaggaatatataaagctttgtaatttccctttctaatagcttgttgagcaaataattcccaaccgacaatcctttcagaatcatgaatattcttttcatcaccatttataattggtaaaagtgatacacctctaactggttcaatttttctattttggaattcttctggatatggatgcttaatatcagctatctctaaaatagttggtaaaatatccataactgtaacgaattgacttctaattttaccattatcaatttctttattgttatttggtttaataattaaaggacatctaataccaccttccgacgcccacattttatacatataataaggagcagttgcagcttgtgcccactgatcagaataccaaacaaatgaatcttttttacctaaattatcaaattgattatgataataagtcttcaacaaaatatttaaatctttcagcagttgttgccattgcttccatcatcataccttctgcaccattgtctgacatgaaaaagtatgaatgtattatctaattcatctttcctttcaagttcttttaaaacattaccaatttcatcatccataatttcaaccattgcagcataaatttccataattctacattcaacttccttttctttatcagttaattcactccattctttttctctttgagtttcaactgcatgtgggttaacaccttcaggtatgaatacctagtttaatagcattatctagtctttttcttctcaattcttttggaccatcattataaatacctttatatttaggcaattttttcctcataagcttgaaatggccaatgaggtgcagtataggttaagtaatccaaagaatggtttatctcctctcttttcatcatcgttcaaaaattgaataaatttatcagtaaaatgtttagtactataaaaatcatcaggtatatcaattgcaggatctaatcttttaccattctcactgaaaattggggccaagaaatttaaatattgattatttgcatcttttgggaaatatttataatggttaccagcaccgggtaataaagtaaaagaattatggaaaccccttttatcaggccaatgatcaggagataaacctaaatgccatttacctgaaataaagttataataaccattttcagataaaatttctggtaatgcagcaactttaaaatttagataaccttcataaccaggtttatttgcaaataattcaggtattctagcagcaaattcacccatttgaccaagacctgcaatatgattatcagtacctgataaaagcattgatcttgtaggtgaacatgcactagctgtatggaaatcagtaaatcttaaaccagtttgtgcaagtttttcaatattcggagtattgatttcaccaccgaaagctgaagtatcggtaaatccaagatcgtctgcaacaattactaagaaatttggctttttagtcattgaattgattggttattgaaacgttaaacaagatggaaagagttcaattacacgttaatgatgatttatattccacttaaactctgaatattccatcacttatgatccagtctccacagtttcgacggttgaattgtggctcttaaatttgatcggccgattaacctttatcgcaaatattacgtaattaatttgttgcgtcacgtgatgtggtggttgggcccggccgcaataaagagagaccttgtagaacattgtataagtttcaatgatgttaatgtttcaagtcattgaaaatcatgctaaggtacatatattggtaattaacttaaccttatatgataatctccaaatgaaaagaccggataattttatcagagaatgtgacttttaagattcagtgtttttttcacttgaattatctttagagagtattatcattcatattgaacaccatcatacttccaattgatacatccattcaatgtattcatatatcaattttatataatcggcaaagaagaaccaaacacgataacaatcaacaactctcagcctccaataaaccttacataaggagcgaattgcgtaatgcttaaaattctcaaatcttcaacatgaatttctttattgatcaatttcaacacggtgttataatcaacaatctcttctgttcatcaattagataatggaagtttatgtatccaatagtgtccaggataggacttttgaatttcagcaagcagttaaaacatttgcaagacaaaacaatactcaacttgttaataataataccaataacaataataacaatgtcccaagtaaaaatgaatttaatagaaaagcaggtatgattgcaaaacatattgtacgtgttacaggatcattaactaaacttgcacacttagccaagaagaaacaattatttggtgataaaccaacggatataattgagttaacatatgttatcaaacaagatattttcaaaattgaaaaagaactcaaagatttgaaaacattacaaatatcaaataataaaagttcatcagacgataaccaattaaaaatgtataatagtaatgttgttcaattattaaataccaagacaaagaatataagtgagaattttaaagaagttttaatggaaagacaaaaaagtgaattaatacaacgtagtagacaagaacaactgcttgcagctgttaaaagtactacagctgaaaatggaggattaccatatgcagttagaagtgctaatttgaatagtggtggtggaggtactactggaagtttagcatctgataacccattccttgcaagtcttggaattgatgaatcttctgcagataataataataataataataataacaataatcaaataactaatcttagtaatgaaggtggatatgatgataatacgatgttaagtttacctgatcaaacacaacaactgatgttattagaggaacaagataatagatatgttcaagaacgtagtcaagcagttgatgcaattgagagtacaattaatgaagttggaggattatttcaacaattagctacaatggttcaagaacagggtgaagtaattcaacgtattgatgataatattgaagatgttagtttgaatattggaggtgctcaacgtgaacttatgaaatattataaaagtgttagtagtaatcgatggttgatgttaaaagtttttggtatacttattgtatttttccttctatgggttcttgtcagttagatgattatagctatgtgcatatgcatattgaatattgaatatctaatatctaatatctaatgtctataaagtagtactagtagtaataatagatcagtgtaattaaaatttgacgtcgatcgacccattactttaacattttgcgacgatgcgactattttttgtctatccagtaagagaagttgcaaatgaaatatttctgtgaggggatgattgtaattgtaaaatattaacatgaatcttagaggaagagaaatatctctgaataacttctccatttcaacaacacaatgttctctagagtcacccgtagtacaataattgcagcaagaggagctcgtatgaactcttcaaaagctattaatgcaactccaaaagttgcatcagttgaagttccagctcaagttaaaaatattacagatttaacaactaatggtaaacaattaacatcaggtgcaccagctgaaatggcagtttcaggtaatagacttgtaagaatatacaaagaaactaaatatgcaacacaaaatggtaatagaaatagtcaattttggaaattagaatgggatattttaagtaaaggtaacagatgggaacatgatttaactggttatcaaagtactgcagattatttacaagctacaagattagattttaatgataaagaagaagctattagatttgccgaatcaaatggttgggattattatgtcactgaaccaaaggaaaaacgttttaaaaagaaagattattcttcaaatttctaccattcaaagggtcctttaaaacatattttcactaaataattgatatatattatactattatatttaacctttatatactctttattcttcaaaatacaaatatttattcattaattacatttttattattattatcattattaatattatgtcgtattttttttttctatacaaaagaatacaaagcatttatacatataaacatgaacatgaaatcgaataagttattctatttaagcagccatttgagcagcactatattgagcaataacttcttccatctttttacttaaaactttatcttgtctaactcttaaatgaatttttgcactttctaataatgcaattgtttgctttctatcttcagctgatctacataatctacatgctttttcaaaacattcaattgcaccattaggattttgcattaataaataaacttgacctaaacttgaccatgcaacttctgatttggaatcgattttaacagctttttctaagatattttgacatgattggaaatcacttgtattttgataaataactgatttattaattaatggtaatgcaccaatattattacctggaattgcttcttgtaatttagttgcaatatcaaattgttttgaagcattttcaatatctcccttatcaaataaaatttcacctaaataatttggaatttctggtgataatgggaataaagttttagcattattaaacattgttaaacatgattcaatttcattgtgtctataagtaatacaagctaattgaatgtgagcataaacattatttggattcaatgcttttgccttttcaaaattagattgtgcctttgttaaatcaccaattaaataataaacttgaccataatgataatagatatttggatcttcaggattcattttaattgccttagtaaattcttgatctgctaaaacataatcacccttatcagctgcaattaatgctaaaacaacatgcattcttggtcttggagaaatttccaaagctttttcaacatattcctttgcattatcaaaagttttcaaaaatgagaaaatacccatatattcataagcaattgcaactaatttttttatcagtttgatcatttgatgaattattattatcttcgaatcttttaattgattgatttaataaattatcagcattttcataaccttcatcagtatctttataaatttcatttaatgcagaaattaaatagtaagaaccagaatctttttcataattatttaaatctaaatctaaatcttccttaacgaatgcacctaaaaatgatgaaattgatgaagatgaaggtaaaacttttggtaaatgagaataaacttcttgatttaatttatctgcatgttcagataaaactctagccataacactatcacttgatttatcatttaaaccaccataaattgataaagcagttaaatcaaatgcagcatcttcatatctacccatttcttcataaacgtgagctcttctgagtaaacatttagaataatctggtttaatttccaaagcacttgtagtatccttaacagcattttcataatcttttaaagcataataacaagcagatctattaccatagaaaatatgatcttttttacaatctaaagcatttgaataataaacaattgcagtatcatattgttttgccttaaaatattcattacccttttccttcaaagcaattgcccaatcatttttttcactttctgataaatttgataaaatttcaggtgtaatatttggtaatttagttgcttcattaattggataaactgaatttttactatcttcttcaacaatactaccattttcagttgatgatgcaccattgttagactttcccttctttttcttatttcttctcttcttctttgaactttcactatttgaagaatcatctgaattatttgaactactattagttttcatataatagataatacctgcaatagtaccaatacccaaaagggcagatacagtgactgcaaccttgttttgttgtacaaaggaagtcatttgtgggatatgttgtagaaagaaaataaaaaaaagaagtaaacatcaactaaaccccattccaaaccatcaatccttcaaaaatattactaaactccaaattccagctgaaaatttataactctcactcctctcttattatattaataaagacttttccccgtcaacgaccatcaattttttttattattagaaaaataaagaaataaagtaaggtgagtaaaaaaataaacgttgcgagctatgtggatcgaacacatggcctccagatcttcagtctggcgctctcccactgagctaagcccgcaattgataaagtttaaaagtggtagataatccttgtctacgctttttcacgtgacaattttttgttttgcttgtttcacttgctacgcattatcatggtgtggtttaaaatatttgaaaagtgtaattttttgtctatttttatgctattatattcatcaagcacttaattaaaaaatatttttttcataatttgagaagattacacagacaaacggtctgagagttttgaagtttttctacattatttggaattcccaatgaatagtcaacatttttttagctataacagcatttaactggttaattcttaaaggtttaaacaaatataccataattaacaatatttataaacaaagaaagtataagattagctcatttgtcaaattattgataacgcatggaataataaggctttaactactattataatactcttgtatttgaatcacattacactacaatcatctatatacataaatactcaaaagtctaaacacataacccccataaacaaactaaaatgaaagatgtcagcttagttctaaatgcacaatcaaaaaatttcgtgatgcacagcttcatgaatttttgcacttgattaaaaattatcaaatttcactttttcttaacagattataaacacctgatttctttctaaaaacaaccaatggcactaggaaatatactgaaaaacactcgtcttgaaacactgattaattttaaagtacgtgtgacaacctcaaattcttcaacttttgtgggaacacttacatcttatgataaatttatgaatttagttttaactgaatgtgaagaatttcgtattcaaaagaaatctaaaaaatatttaaatgaaattaaaaatgaagaaattgatttatctaaaataaaggaacagaaaagattacttggtttaattattttaagaggtgaaaatataataagtgttgtcgcagaggcagctccaaatatgaatactttgaaaccccagttacgattgaagaagagtaatgtggcaattaaaccattaaagaaaaaattaaattcagaaaaaccacattcaagtacaaatggtggtgttcataaacctagacgttaaatcacctatatatcaccaatataaatttttgtatactacctactactattaataaaattaagatctattaattttttaatattgatacataaaatcttacatattcagtttctataagtaaagtgatgcacagaagacaatatcacgcttaatcttttcttgagcttctgtcatcttggaatgtaatgctgaatcacctgtaattaatgcagcatttctaacttggttacatatttcatctaagaaagtaataactctaacaatagtaccttcagattcatctgcatcgttaacaaattccataatatccttgaaacttctacctctggcccattcgtaaatagtattaactaatgcaaatctatcattctctaaaaatgtctcttcttcatttgttaattgaatttccatttcagttgataaaaccataactcgttcaacaattgaacaaatcttctcctttcccttctctaatcttggagttgataatttagttggttcttcatcatcttttttacctcttttaccttcaaagacaaaacacgaaagtagtgcaacaatttcttcggaactgaatccacctaagaaattttcgaaaactaattcagtaataattaattcccatccacaattaactttcacacgcaactctcccctttaaattaatagtcaattgttctggattaacataatcaagttttttcaatacttccaagtcttttattatattcaggtaaaagttctaaattttcctcacttaaagatctctttaaatcatcaattttatcaactaattgcattctagttgaaaatttcaaataattatcatcctcatgaaattgtttaaaaatctcgttatctccaagtagtctacccaattgttgtaaattagccaaataagaacagcaatcactaatattagtttcattcatgaaagtattcatgtccttttctttccaatggtttctcttgtttaataaaacttgtaaagattcaaagaaaatcttaacagcctttgagccattattcattaatgatttattgatttcaatatattcatgagccaaaaattcaatattttcacttggaactctgacaggtagaattttacgatttggattaattttccactttggataccattcagctaaaaacattgatcctaaaattggattaaagaataatccagcatcaattaatcttttaattttactagtatcattttctccggccacagaggcaaccaaacattcaatacaccctttataaaccgtgttagtagctattataccaacagttggaactccggattcatcacggaaaacaataagtctacctggtgttaacactttctttgcctttttaccactgataatagatgggaataaatttttcatcaataaccgtgtatcctttaataaggaataaatattctcaaaagtttgtttggtttcaacaggtaattccaattctttatgattagtcaattccttttcaagtctgagaatttctaattgttgttctggtaacatggattgtgctgaattttcaccaaatgatcttttaatcatatcttcaactcttaatgcttcaattcttaataaattcaaaatcattgtgtatgttaatctaaattgtgacgataatttggtaggaacacctaatgcaacttgttttaaactatttttatcagcaggttgttgataggtcataatcataactgtaccaatcttatctaaacctctacgaccagctctacctgacatttgtgtgaattcaccaggtaataaatctctgaaacccattaccatcatgcttttctaattgaactgaaatacaacagttctagttggtaagttaagacccattgcaaaagtttcagtagcaaataaaactttgactagagatttaggagaataaaatctcaacaacttctttaataataggtaataaaccaccatgatgaactgcaatacctcttttcaacatttctctcatccttaatatttgtggtaactctctatcttccttctttaatcttgaaactgctttatctatgaacatatgaatctcagatgcttctctagcagttgaaaaattgaacccacttaaagtttctgcatattcttcacatcttttcttagaaaagacaaaaataacagccggtaataaatcattctttttgagatagtctaccaaagtaatccacgatttactagttggtgcatctcttttcataaaatcggttaccattattgttattgttactaccaccacgtccacctctttgggacaaagcaccacgacccccacggccaccacggccgccacgaccactattattatttgcttctttattctcagcctttgatttcaaatacttatcagcatgttgattatatccagtttcaaggaaatttctgttagagtctattactttataaggagtatcctttgcaaataaaaatatttctaatggaactggtctcttaggagttgaaataacgtaaatatctttttgctttgttctaccaacccatgatgcaaattccaaagtatttggaacagttgcagaaagcaagatgattttaacatgttcgggcaacatgataataacttcttcccaaacgacacctctatcaacatcattaacataatgaacttcatcaaaaataacaaactcgacatctctgataacatcagaacctctatataacatcgaacgtaaaatttctgtagtcattaattaaacaatttgcatctggattaatctgaacatcaccagtgataacaccaacatcaatttctttgaaagtatgtttaaaatctctaaatttttgattacttaaagccttgattggggatgtataaattgccttagtcatattattatgagccatcgcaatcgcatattcagcaacaacggttttaccagctgatgtatgcgcagcgacaaaaacggaatcaccttgttctaaatgataaactgcttcctgttggaaaatatccaattcaaatggccaagttctagcagggttagggatgatttcatcaaaattttcaattttatggttaagatcaacgacatgtgcccaattagtttttcttttctgttggtttaacaatgtaccagagacagttgaaggtctaataattgtatcttttggaatgagctgagaaatttccgtatccatttcatcatcattatcatcaacactactagcggaatcttcattgttttcggattcagtattcattatatcatcattactattatcatctaattcttccgctaatatattcatttcatccgattgtgtatttttaagaatttgtaaatctgcttcattactatcatcatcgttatcgtcatctgcaccaccaaaagctctcaaccctcttgaaaaaccttgtggaatatcataaagaccgtatttgtccttatgtaaatatttcactgcattattctgtgaagtattggtattatcagttgaatccaatccaccaggtaaaaatggtaaatttgcggtagatcccttaacattcaactttgaatcacctgtaaattttctattaaaggacaaggaggattgtgaactactattttcagtcaaatcaattgcaaaatcctctgatgatgacacaacatcaccattgattcctgatcttttaaaccttattgtagttctattcaataaatcaggtaattttaatagagatgcattcaattctgactctttctcatctgaaacattaggctttccactgaattgatcaagtaaactccaaggtaattgatcacttggtgttaaatatttatctattaatcctttggtatctgtatctctattaagattaaaactgcctttttcggtacctgtaattcccaaatctgcaagaacagattccggatcccaaccatcgtcactcatgtctagttgtctgtgtctgtaccttttaatacctctcccaacatcattcagagccttcaaattcaagtaacccatagtaaaacactaaaaattgccatcccccgtgcaccacccaaaaatcccacactataaaatttgaaattgccctttaatccacacgattttccccccacactgttaaatgactgaaatttaaagagagggttctgggtacatgaatattatattgtggtgctacttttatcataactgattcattctgtaaagaagttctaatacacaatttatcagtagctttgctcacaaataattccgaaatacaacgcatataatattaacattaatattaatacatttacctgaataaacattaacataataatcaatcaaacttcacattcccaattaaaatcacaatgggtcacgttacaatagcagattcaactccagttaaattatgcgtggttatagtaggattgccagctaggggcaaatcatttatatctcagaaaattgtacgttatctttcttggctttcaataccgaccgaatctttcaattgtgcagctaatttactgaaaattttagataaatcaaatactacttcgaatgaacttttcacttcagatgtatcgaatattaatgatgatttattagttgaaaatagaaaacaaactcttaatcaaatactgaaatggtttaataatatagatgtttgtggtgttgcaatttatgatggtattaacggtacaagagatgaacgtaacgcaattgaaaagagtttaaaagaacaaaatattgatactgtattccttgaatcttattgtgatgatgaaacaattattaaatcaaatatcactgatattgaatcaacatctccagaatattcaacgtccaaatcaatggaagatacttttaattcagtttcaaataaaattcatttctataataatgcatatcaatcattatcaacaactgaggaagcagatttatcatttattaaattaattaatttctcatctcaaattgtgttaaatcatattgattcatatttaaaatctcgtatagtttattatattatgaatttacatgtcaaaaatagatatatttggctgtcaagacatggtgaatctcagtataatttagaaggcaaaattggtggtgatgcaaaattaagtccaagaggtgaaaaatactcagttaaattagtcgagttagttaacaaatatataccaaatcatgataaattagaagtttggacttcaactttgaagagaactcaacaaactgctcaatttttaccattccctcagaaacaatggaaagcattggatgaactagatgcaggttcttgtgacggtttaacttatgaagaaatagctgttaaatttcctgaagattttaaagcaagagatgataataaatttgagtacagatatccaggtggcgaatcttatagagacgttattacaagactagaaccaattattatggctttagaaaatcaagaaaatgtattggttataactcatcaagcagttcttagatgcatctatgcttattttatgaatgttcatcaagaagaaagtccttggatgagtatacctctacacactttgataagacttgaaattaaagcctatggaactcaagttactagaattaaagctgatatacccgctgtctcaacttataaagaaagaggtacatctaaactgggcgaatcgaaaaacagtattaatgttatgagtggctctgtaattagtggtataactgataaagtaattaaatgaatgtgcgtttttttaattggatttttactcttatataatgtttatatcttatgtttatgtagtttcaagaagttttaatggattggaaactgtttcgatttactaacttaaatttattcaattataaaacactatacacttgaaataaagaagatttatttatttacatattatatcttaaatgtaatttgattgattatcaagatcaaattcactattattttcaagctcaagattaagttcactcagtgcctttaaattctttttaataaatttggacttatcatctccaaaccaatcatcaataaatagatatttttctctatatttagaacttatacttcttttcattaaatgccaatatatccttacataagatattacagcatattcaccattaattctaacctctcttgatgcacatgaattcagtgtgaataaaataaatagtgcaactaaatcaaaaaataaaatatgaattaattcaattactattggtagcttttcaagtgcaaaaagtgttgtaacaacaataattgcacttaaatttaaaatcattgacatcatcatcaaaatattaaagcctctataacaaaaattacaagataaaagaaagtcaatctttttaatgaattccatctcttcatcagtaaattcgtacttttttccttcaaatttataatctaagaattctgctaaaggttttaatcttggaacccagtatccgccgcttttacttgggaatcttagttttgaatttttagagaaatctcttttcgatgactgtgtcggctttttaaatgttaattcataaggaacttctgattcatcagatgattctgtatattcattgtaaacacctgaacttatacatgaatttatattatatgcaatttcaatattatcttcaagtgtttttctcttatccataatcatattttcatgtaatccaagttcccttttctttctatcaattgtagtatctgcaaatgtcatatctaattttttattagctggatatacaggaaaatgattgttttgagattttgaactattgcttttatgtgttgaaatagatcctctattgcttttattgtgtttaggactatttttatgtgatgcctgaccaccgctttcatcagatgatgattgcaaaatattctgcattttctgagcttcaagatcaaaagtactattattgataccatcattgaccgagttaccatgagtatctccattgtccattatatcagcttcataattttcaggcggtaagttaggatcttcaacaaatgctgaaagtgtagagctattatcaaataacatagcagtttgcaaccaagcagttacacctttattttctgaaataatactaagtcttggagcactatatcttttttcacgtggatattgaccagatgatagatcattatcactacttccactacgaccaccatcatctatatcagtatcagccatacccatgggtgaatattggctagaattattagtattattataactaccttgattcaaagatcttctaggagagttattgtttcgatctgctaccactaagataacttgcaatactacctctatgttttgattgaggtgataagttattattatttgttaaactttctccacttttatatgtttcataagaaatttgactttgattcttttgaaaatatatcgaagacctttgtgttttttcactgtcaattcctgatttattgtcttggatttgcatttccttttgtgtagttttctcttgctctgtttcttcatgcgctttccgcatttgccgttgagtcttgcgtccacgacatcgggtctgctcttgcatcacaggtttgtaatatttgtaaagatattcttccgtctcgaattgttgaatccattgttggagtttgggtatcatcttcaagcttagactttgggctgtccgacaacgacgaattaggatgtattctaaccatcttaatatgtggtaattaaaaccaaaataaagctttttgactttttctttgaacagtgtataatattatccttaattcaaagaaagaaaaattattgatagctttgcaatagcagtagtttttttgataacgataacaagaacttaaccacaagatatgtcaagcaaagatatataacacgtactatactaaagcgtacagatagctgtgccacttaaactgtaaaagttgtacaacacaaactgaacaacactgagctgttaaagaggcagtctgaaaaaataataatttatgggtaaccaatgaaggggcaaaatgttttatttcctaaaagggtaatttttgagattccccatacattattcccaaatgattaacaattttcatgttgataatacgtttaagcaatggttaatgtattgtacatgctgttatgggagtgtatctgagggaatagatggtttttaaactctaagaaggtggtcattacaccttaatctaatgggtatcaaaaatatatcatttcattttaaaaagttacgtaatcaggtacagctactatattggtggttcagataaataaattgtacttttaatggatataaaacaatatctctgatgaattttctatatggatatatacaagggttatgaaaaaaagcaagtatcatggatctttgaatgcttatattacaattttgatgaaaaatcttttctattctatcttttctattttctagttaatctcattgaattttccttatgaatacctttaacagctttccaaagaccatcaacttcttgttcagttggccatccaggaacctgcccatctaatcttataagagtcatcaacgagataaacataaccagaatatgcattagtcattaaaagtttttcacgatcatctcttgataagacattatctcttctagctaattaaatatctatcatgttgttcctttggtctttgttctaaaagtttaccaggtgtaacaaatgtatgaataaaatgttttgaagcattttcacttaacacaatttctacgatttgagtatttgggaattcttgattaaatacttcaataccattctctgacatataattatcttcactatttttaattttaaaataatcattagtcatttcaaaacctgcatcagttgaataaacacgtaatatacttaattttttttgatctaaaacatccattaaatccattcttttacctgttaatgatttaactctaaaatttggaaaatataagtgatttatctctacggaagaaagaaattggtgattcaaacaatctaccctttgtctttgtataaacatggaaatcatacataccaccataagccaaatctttttgaattgcttcaactctagttcttcttgtgacaccatcaaaatagaagtcccataatcttttaggaaaatttaaattttgtaatgtgaaaattgggcttgaatccttatcttgtaatcttagaggtggtttagcaaatccaaatggtttggaaattttaaaatatttatgaggtttgggcacaatttttgccatactttgccctaagttaccaaaaaaccctgcatttcttacaaatgtacgtggacctagcttgtgatattctagacatgtatgataatccaataccttttgttaagtcacaaaagatcaaagaagtagttaagttaaagaaacctaaatagtaaaatcagtgaaaataagaaaaaatgaaaaatgttaatgccttagcaaagtgactgaatgacaataggaaaattatgataaggattggtaaatatcaaatttcactcttttcttaacactatttctttatctttttctcttttttagtagacaagtaggtaaagtatggatataaagaagatattcaataagaaaaagaagactaataagcattcttcttcttcagtacaaggttcgtctagggaaagatcaatttttgatggtaaattcaagtaacattgataaaaatatcaatgaaaacctagaatcatctaatgataataaaagtttccaatattcatattattccaactctaactctttattcagttctaaacgtacactatctactgctggatcatcacaggcaagttctaataatacttcttcatttaatagatcatcaggtaaaaaatttacaagtattggacgcccattacagatattaaatgaaggatgttcaggaagatgaaagggaatatgatgattataatacggaagatattaatgaagttgaagatataaatcatgatgaaattatgaaatttgaaaataatcctattgaggaatcacataatgataattttgaagaagatgaagcagtagatgaaaagatggattatgagaatcaagaacttgatgaaagttcatctaaggtgcaatcatcatctcctatattaaacagattcaaatttactaatgcttcacataataattctcaaaataaagtaccatccattgatttatcatcaattaaaacttcgaaaactgctgaaacattaaatcaaatgaatgaatttatcaaaagtcaacttagaaacttaagctattcaatgactaatattatgatacaaatttcacaatctgttattaatttaactaaagcatcaataatgattactgaatgtatgaattcaatatataggacaattaaaagttataaaaatattgatatattagagagggatcaatttaatacaataaattctataggtttaagaagaataatcaaaatgtgtcttaatttaattgataatttattagttggcgatgtttataataaatccaaatccttgattttaaaacatctctatgatcttttgaaattaattaaaattgtgccaaatgaatcacattcattaactaattttattacatttatgtcaccaaaagtattcccaattgattttaatataagtaaattagcaagttttgataaagttgataatataatgaataaaatattatctaaggaggataatagtatctttgaagatcaagaaggttcatttattgcacctgtttgtagaggatttttcacatcatcattaagtgttagttacatttatatttggatttcctaaattaactaaggaacatcaagatgttatcaaatcatttggaacaaaaatgaatgaatttcattttatgttacaaaaaaataaaattttatcctggtagtatgaataaggaacaaatgaaatttaagatgccatttagaactatcaaggatgatcaagaatatataccaatatcaatgtcattatcatcagattatgcaaatatttcaagtggtacattaggtggttatttatatccaaaagtttcaaataattgtatgaatccaaaaatcttaaaatatagaggtaacgtttttggattaacatgtgcacatgttgttttgaataatgacagagagaatgaagatgttaataaagagaaagataaggaagatgctgacgaggacgaagacgatgatgatgatgaagacaatgaaggaattgttaaatcagagaaaaagaataagaattcacatccaaatatatcgattccatcaagtgttttaattaatctctataagagagcattagttcatgagatgaagaatcattcaaccaaaacaccagaatataaagtatatcatgatgcagtttcaatgattgacgaggaatttccctatacgaaagatacgtataaatgataagaaaatagtttttaaaaatttacctaaaaataattttggtagtatagtatggggagagagaatgattaatatgaatagattaagtgatatggcaattatcaaaataagtgatgaagtgaagggtaaaaaatatattaattatctcggagaggatttacaattatcacaatatgatccatcattaatattatccaatttaaatattaaatgtacagttagtttacaaccacgtaagaatgggattttaaataattctaatttagaagttttcaaagtgggtagtacaactggatatactaggggtaaaattaatggtatgaagatgatttattggtccgatggatcattacgtagttctgaatttattatatcaaatggagatggtaaaatggaaggatttgctaatggaggagattcaggtgcatggatattaagtaaagtaagtgatgttaataaaatacgtagaagatataatgaaatattttctgatgaagaaggtggtaacaataatggtgatgaatttgggaattataatgatagtagtgaagaagatgaagattatgatgaagaagaagatgatgaagaagaggatgagaatactaaggcatataaatccagtttaacatcatatattgaaagttttataccaaagattagagttaggaaatctaagcaaagaaaaaataagaagaagaatagaagaaataaagggagaaggtaataatgataatgaagaatatgagaatagtattgatgatgataatgagaatgattttgataatgaaatgggattaggagttttaggtatgttacattcatatgatggagaatataaacaatttggattatttacaacaattgatgatatattagatagattagagaatgttacaggaattgaatggggagttgttggatgtaatgaagataaagattttgatgttttcagtaataatagtatggaaagtaaatcaaggacaattataagtgaaacaacaagcgataaagatattgaatagacagtaaatagttttctttttataatttagattgtattataataaataaatttgaaaaatatagaatatagaagatgtataaataaattgattaagattgagcagcttcaggatcaacttctttaatccaatgattaccaataactgggattttttcatagaaagttttttggaataaaggccagttttcagtaaaagtagcaagagctgcaccacctgcaacaccccagacagttaagacaggaatgtaagagatgatacttttaacatgataaccaccaaaggtagcagcattcttaaggacaggaccagaaacgtactattggaaagtaaaaacaaaagaggtaatatgttagtatatgaagttatgattgtattaatgaacctatatttatacttacagccattgtgtgtttgataaaatgaaatgaaatggatactttaactatggtcttttataaaaattatgaaaatatcaagtaaattgcatgttagtagtttgaaaaacagcagtgattacataaggattattataattataatttgattggttgataaattattgagatggtaaatacaacagacgcgtctatttcaccaaatgattacataagcaaaacacagacgcgactttcaccagacccggtgagaccggaaggtactttccctcctccccttccctcggaatagaatattgagaaagttcctagtaaatactccccacagataaaagataaaaaagataaaaaagattaaaaagattaaaaagataaagaaaagctccccgcggaagataaggagggagcttttgacagtgtgtcaaagtagcagtatcaatgttaaataaattattcgatttttcagcaccaaaatctttgttctcagtggaatttgcgaaagaagaattaatattcatactttctagaaatccattgatactatctctctgagttccagtaacacctaaagccaaaactttcttcagtttctcgataccttcatgtatatacctcgttgtatcatccatgacgatatcgctatcttcgatacgatcatttgaatcttcgtttaaattgttcgacatcttctgtttaatttaaatttattccaatatattctattaatatcaatcagaatcgattcctatctgtcttataaagaaaatataaaaaattatataaaactagtagaaaagaaaatacttttcaaaatcattgtaaaatataggtgaaaaattttccaatttaaaccataattttcggcctgctcaatctgcgatatctcaatatctcaacacaccacctaaatcaatgtatcaatctatctatgattcatttgcaaatataattttagttagatgttccattgttttaccagatattggtttagtaagtaaatcggctaaattttcttctgtatcaactttcttcgcactaacaattttgtttccgatgtattgatacgccacacatgcatcctgagatagataatttgttctttgagatactgtacctgtatttacaatctgtaacatactattgttatcacaaaatacgtctgttggtctatccaagttgtggtttatatcaaagccgtaaataaaagttaatattcttctaacttttgttaccatgttacaagattgaatataagcatctaattcagcctctgttgaactttgacaaacttttcctttcttatatctccaactgattggaccttcggcatatgtaatcattgttcctttgctagaaataaaatctgatttatcacctgaatgatccgagtctgagaatgctaacattggtttatttatattactaaattcaattttaatgtcctttgtacataaaacgtagtttattgctcttttagtttgtgtaataatatcgtcatgtggaactgtaacgaatctggctaaataattaacagcatattgaatatctggtctagttgcaccagcaatgaataataatcccccaattgcacttctcatccactttattctttcatttaattctttaatgttaattcccaaatctttattgtaaggttggaaatagaaacccggttctagtggtgttttatatttctttccagttgcttcaaatctttcacaaaacttttcaatatactttctttgatttatctcaattttgccttcttctaccttacaatcaatgcctaaaatatttctataaccttcagtatcttcctcactagtggtacatttaaaagtttctttaattttatccatagtatatttcacataatccggttttcctgtgattattaaatcatcaacaaaatatccaattaaaccaactacatttcctttttcatctgttaatctcattatgcattcaatatcagaccatttttcataacctatgttttgtaaaaccttctccaacagcatttgccaattgcgtcctgactgttttaaaccgtataatgatttcttcaacttgtgtgcatacattatatgtcctttgtaattttgtacattgaggaaaggtgtttcttcaggtaattgtatatatatttctgtatcaatatcagcatttacatatgcgtttgaaatgtccataaattctatgtgaaagtttaatagtgttgcttcagctaataatattctcaatgattcataacttaatgttgaagcatatgtttcattataagtatcctctggttgattgtcacctctagcgaccaatctggcttttaatttatcgtctctcttttcattaagtacccacatagtcttcacaatttttcttctatcgctttttgaaattaattcagtaggtactagttcccatgtaccatgttccaatagatttccatattctaatttcattgcatcaatccatttttcagcttgatcactggccatagcttgtcttagatttatactatgtatttttattatgtctaattttaggtcttgaatatctttttccaaatttatttcaaatatcatatttgtggtaaatacttttacattattgaattcatggcgattatatccttctgcaccatttctatatgttgacttgatgtttgttctaaatctactaggacttctatctctaatgacatctttatttacttgatgttcatctctatctctaataaattcatcttcattttcatgatccattttatctccatggattatttcatctaggtgtttgttcaactccttctggtattcttcttcataaaaacttttttgaaataataacatcgcttcatttccaccaatatcatcaccagtgttaacgttttcgatatttgtttgaacgatatcaccaccagtatcaacgttttctgtattctcattgatattttcaatagtattatctacattttcatctaatgtgtcatcttctaaatgtgttctttcatattcatctatgatttcatctaaacttacgtgaagtgcaggtttttccactttatgatttttatcttcattattaatccataattgctcatcagagcagtcaaaaaattgatctttttcatcatcatcatcaacaacgtcatttacttcattgcttattgtagagctttgtatatcaaagccatcaatataaatatcaccacctaaattctgttgtagatttgcacctaatttactgttatcaccacctaaattaatatcaccacctaaattaatgttatcaccacctaaatcagtgtttggattacctcttaattcagcaggtattaatgtatgtggtaattcaatgttatcggttgtattggcaattgtttgatcatcatttgttttggaagaagaagaaacaacagtgtaacctcgattaaattgacttggtgtaaaaatttgcgtgtcaatgttgtccgcgattttctcaacatgatttggaccagcagtggttgtgggattaatatggttgtgaacaattacttgaaatggttgtttattcttttcatccaagttagattgaaatgatttatggtgattgtcatttaaatcagcattattatccgttggtagttcatttgaatttgtatccaattgatttatttcctcgatttggttatcagcatgttcttcctcttgaaatagtaaatcatcataaatggcattgtgttgataattgtgttcagatttaagataatccataaataaattttcttcatcaaattgtacatccattgtatgtaatatcaccccgaaacctttcaaatattcggtattgttttcaaattgttgatttggataccatacaacatgaccaccagcaactgtttgactcattccaagataaacaccaatgattcctctattagccaatttcccttttgattgtaatttaatgtatactttgcatccaaaaatgtgttttggcacatcattatattcatttgaagcattaatgttttcataaagatattgaagtggagatttatcgtctagatgatgatatttacggcgattcataatttcaattgcatgcaaagcagcttctggccaaaaatctaatgtaagttttgatttattcaataatgctctaacttgtctaagtaaatcttggtttaatttttctaccttgccgtttgatttggaagaatgaccagatgttgtagttaactgaattcctttattatcaataacttgtttagtgtgaccaccaatgaattcggtacctttatctgtgaataatcgtttgacattaaattcccagaaatttttggtcttatttgcatatagattaatcttatcgccagtttgacttttcttatccaatatgaaaatggttttatgatttgtgtatgcatcaattaaaacaagtatgtatttaccagtttttccataggcctcacctttaccattagtaacaaaacatagatcagcgtgtaccttgtagaatggaatgtctacttgatatttgttaggcgaaccagagtaagctttgtgtgcttgaatgttagataatttacaaaaatcacatcctatacaatcttctaaatgaccatgttctttaacaatttttggattaacatgacccagagcatcgtgccaggtaattgaatttatttttttggattcgaaagaatcaaccatgaattcggagtagaacaatctatcaactttattaaattttaaaatgttttcttgagtgacgttgtccacaatgaatgcagaatttttgtttatagtaccgaatgaaacttggaaattcgcatctaataaatcagatatcgataagatgttaacttgtaatgaaggagtgtaataagctttgatccgtcttatattgttcccagatcctagctcaaaataaccaacacccagaacttcgatcatagtattatttgcagcaacaatttcaacttgttcatctagttgtgttgtaaaactcttgaagtaatttttatttgaaaataaacatgcttcggcaccagaatcaatcatcaaacggtctcttaatctgaagcttttatcggattctccataatagttatctgatgtaatgaaaatccttttaatttttatagcaccaacgaatctagttattccaccattgaagtttgcattcatattgtttgtttctttagtaatagaattattgttgttaggcttgacatcatcctttttaatagaagacttgacatcatcctttttattatcgactgtctgatcagcagttgtttgttcattacctttttcaactggagccttctcatttttgtttttatttttagactttctcttatttttacgtttggtagattttgccatttgttccttagatttttccgatggtttaatagcttcttccattaacttaactgatttttctaaagatttaattgaatcctccaatggtttgatggattttgctattttctcttcagatgtagttgaaatcttcttcaaatattcctttacctcttcttccgttgccttgcaaataattgctttatgtcccttttttccacatctgaaacaatttttattaaattccatgttgtctgtgttttcaaggttgttttttacacttacgttcagcgtcttgtagtaatcagaagatttggttttcatatttatatattttaaaaaaaattcaaaagttagagtttgttcctctaatctgattgtcaaatctgttggaagttttgacatattattttcaattatatcaatatgaaacttttgagcatttgggttgatctttaataaccttgcggtcatatcaactcgtttcaattcttggtaaaattttgggtaatcatggttttctaatttgatttccatgacagtagcatatagtctacgtggatcaactataatatctaaaaattttatggcttcacataaatacattaccgatgtatccattggaccaacgcatgtcttctcgatatgttcacgtaccttcggagataatgatctcttaataattgaacatatcgcattttctgcgaaaccacaccacttgatgtttactggagataatgaccttctgataaccatgaatgcttgctgtacaattatactaaagtttatgtgacctgttgcctcatttaccattgacaaccaagtttcaaaatttgatgctgcatctaacttcttatcataattgatatcttgcaccgctttcattgctttagtcacgcattcacctcctttgtgaaaaggacaatcagtagatttccggtaaatccaatcaccatcacgtctttcagcgtccataattttcactttgtcagtgataccactgatatcaaccaaagttatatcagtgtggtggttaccttcccattgaccccccatattcgatttttcagcaccaaaatctttgttctcagtggaatttgcgaaagaagaattaatattcatactttctagaaatccattgatactatctctctgagttccagtaacacctaaagccaaaactttcttcagtttctcgataccttcatgtatatacctcgttgtatcatccatgacgatatcgctatcttcgatacgatcatttgaatcttcgtttaaattgttcgacatcttctgtttaatttaaatttattccaatatattctattaatatcaatcagaatcgattcctatctgtcttataaagaaaatataaaaaattatataaaactagtagaaaagaaaatacttttcaaaatcattgtaaaatataggtgaaaaattttccaatttaaaccataattttcggcctgctcaatctgcgatatctcaatatctcaacataaatttgggtacatttcccttgttttcaatgttttcttttatcttttttttactttactttactttctctaagaaacaatgactcaattcaccactttatgtcactctgaacaatgttatactgcttattatggtactttcgctcatactccaaagttaggtaatttagaggtcttaccaaatactcttttaggtgttgatcagaatggtatgatagattttataatatcggttgagcctccaattgaaaatgaaaatgaaaatgaaattgaaaatttaaaatctttagttataaataattcttccattaaactatctcctaataatattgatataatttcaattgttgataatgttaatagtttcttcttcccaggttttattgatactcatattcatgcacctcaattcccaaataatggtattttcggcaattcaactttacttgattggttagaaacttatacattccctttggaatcttcatttaaagatttagaaattgctgaaaatatttatactaaagtagttaatagaactttaatgaatggtacaacaactgcttcttattatgcaacaattcatacaaatgcaactaatttattagctgatctttgccttaaattaggtcaaagagcttttattggtaaagtttgtatgaatcaaaattctcctgatcattatattgaaacttttgatcaatgtaaagaatcaactttaaatgttattaatcatattaaaaaaatgaatccaactggtgatttaattaatccagttataactccaagatttgcaggttcatgtaccgatgatttattaaaatggttaggtgaattacgtaaaaagggtgattatcattgtcaaactcatcttagtgaaaatcataaagaaattgaatggattacaaatatgtttcctcaatataaacattatactgatatttatcatcaaaataatttattaagttcaaagacaactttagctcattgtattcatttaagtgatgaagaaatgaatattttaaaattaacaaattcaggtgtaagtcattgtccaacttcaaattcttcaattacttcaggtgaagctaaaattagatggttattaaataataatattaatgttagtttaggtactgattgttctggtggttttacaccttcaattttagaagttgctaaacatgccttattagtttcaagacatttagttatgaaatcttcaaatgatgatgaaaaattatcttcagctgatgtactttatcttgcaacgatgggtggtgcaaaagttttaaatattgataataatgttggttgttttaaaagaggtatgaaattcgattgtctacaaattaatcttaattctaaaaattcaaatattgatacttttgaatttcaaaatcctaattggtcattaaataatggtattgataaatttaaagatttaatagataaatggttatttaatggtgatgatagaaatattgaaagagtttgggttaatggtcgttgtataattaataaatagtaataaacttatataacataaataataattataatattctaatgataacataaactatacaatattgggaaatttttatacttttcttgccaatccgttataacatcctctatttgatcttcccaaatttgatatttttcaacattttcaatactttccttatataaattatttaaattatttgctaattctaaaattgctttaccacctaattgtgcactttcatgatcatcacgaatttcaacattaaatacatgaactttattattaatttccattggatcaaaataatttctagccaaaaaatcttcaacaacattatcaaaacatctctcttcacaagttattacaatttcaaaatctaattcattttggaaacctggatgttcatcttcaggtaatttttgtggtggttgattaaaatatggccaacgttcaggtgctttcttaatattcatattacgtactgtcatctctaaaactccattatttttatgaactttaataccttggccctccaaaactttcattatttcagtatatggtgtaccaaatgggaaaacattaggtttattaattgatggcccaggtaatctaaccgcagatcctgtaccatatgatctaactatatatcctgcatctcttaatactttatgtgcttccatcgaacgattattattagatgcacatactgtacaaaaccttaaatcttgtctatcatccatatttgtgtatatattgtaacgtttgatatcaaaagaaagtatagatgttaaaatttatagtgaaaatattgaattttggaaaatactgaaaattcatgcactctctcaaatttccatgtttttcgttatcagtggattttaactttggatccacactttcatttaccaaggactgacaaagatatatgcaaataccaattataatactattattattcacatggatagtctctgcgaatgtatcagatacaccatcatttcaaagttttaatgattggaaaaaagataaattaagtgatgataacaatcgtcaacatcatacaggtggtggtagtaaaatattaaattctccaatacgacaaaatcgtatgaaaacaagatcaaataatgagaatcctggtggtgatgataatgatgaggaacatattggtgaaatgatgattgaattatcaatgtttacaggtgaaaacgatgataataataataataatgtcaataatgataaaacaggattagggaaagggattattgagaaagatattcaagatgatgggaaattatataaggatagatttaattttgcatcatttgattgtgctgcaactataattaagacaaataaggaagccaaaggtgcaaatgctgtccttttagataataaagattcatatttattaaatgaatgttcagcaattaataaatttattataattgaattatgtgaagatatattagttgatgaagtattaattgcaaattatgaattttattcaagtatgtttaaagaaattagaattagtgcaagtgatagattcccagttaatcaatggataattttaggtgaatttacatctgaaaatgttaggaaattacaaaattttaaaatcaataatccaattatttggacaaaatttttaagaattgaattcttatcacattatggtgatgaattttattgtccaatttcatcaattcaagttcatggtaagacaatgattgaacagttaaaagaagaagaagaggaatctgtaagtgatgaagaagagaaaatagagggtggtataattgaaagaggcccattaattaattttgaaattaatcaaactgaaatgggaaattccaatgataaggataacaatgaaactaatttgttgaagaaaacaccaatatttgatgttgatttatttaatagtacatggatatcatgtattgaaattaatgatacaatgaaaacaaattgttcaacaccgaaatatcttaaacttgatgaatttttaaaagattatgagaaacgtaatgctgaatatggacaatgttttgataacaatactaataataataataatgatttaacaacaacgatattaccatcaattaaaccccaagattctatttataaaaatattgttaaaagattaaatttattagaatccaatgcaacattatcattactatatattgaggaacaatctaaattattaagtgaatcatttataaatttagagaataatcaaaatattaaatttcaaaatattcttcatcaacttaattcaacgattcaaaatcaaatgaatacatttgataaattaaatactgatgtttataatagttttgcaaaattatttgaatttcaacaacaaaattttgataatactaataatgagattaataaggaattaaaagatttgaaaagatcaatttggatttacagaaatttaacaattttgacaattttattagttataacagttatttcatataaaataattactagagatattataattttcaatgataaagaatggaatttcccaacttcaccagattattcaccgtcagtatcaccaataatttcaagaaaatcatcagttgctaaaatttttaagaatgataaacataagtatcctaatagaccggtgttagatgatattaataatgatgatgcagagatattatttgaagaataattgaaagatgttcactattagtggtaatagtagacaacgtttttattaatttcaaattattaacattaattagagttttttttatatattattatagtttataaagaagaaaaaagatagtttataaagattagaaaagtaagtaagttataatgtaatgtagtgtaaaagtctatgttctatgttctatgtttaatgtgttctatgctgtatgttttgtcatattaatttttctttataatcgtttaataatgaaaattcgttatttgaataagaagtatttgaagaaattgatgaaaatgaggaaaaatttgaaggtgaatcacaaggagttgtaaagattgaatctgatgaagaaattaatgaataatctctaaaattgtttaaatttgatacattgaaagaacaagattcatcaaatgctaataaaaggtttgataattcaaaacaataaggattatgtaattgaataactgattcaatttcatttgattcattattagaatttggaattgtagtttcaataattgataaatcaatttgatataattcattttcttcaataaattttttaacaactgcaataacacctaatggagtatatttctcaattaatacttcagaaggatttaataatgatttaaataattcaattgtaattttacgtatttcattaattgtatcaataccattaaaacctgaaatgaaaggaccaaataatttattatcatcatcattatcaattttattattattattattattattatcattgttcttggtattattatcattatcattaatataagattcaaaattttgataaatattattcaagaaattagaaccaacattcatatttagtattgaacaagccattaaaaatgaagatataccaattaatgaagttgaataatttaagaaatttcttttatataatgataattcacataaatatcttgaaactgctaaaattgctgaaacggttggagtattacccttatataaatgtaaaggtttatttaataattctttaccatcaggatcactaaattttacagccagctgtaaaatatcttctaaagttgtatgaccaattgaccaatttaaagtacttaaaatatgaatttccatttctttaaacattgaatcatcataaacatttgaacacattgtatttaattctttaatatttggaactcttgattttttatcttcatattttgaggcaatccataatgaagtacaaccaattaattgataatgttgtttaaatgcaattcttttagcacaatatctatcaattatattccaacaaagaaataaagtttgaggttttaatctaagagatgaatgcatttgaattatgaaatttactaaataaggtctcatataccatttaacttcaggttgtaaatcaatcattgaaggattaattgaagatgatgattcaagatatttaaaatgttcattaattgaaggtaaatattctgcagttattaatttatttttaaaattttcaattgattctaatttagttgaataaggttttgtgattggtcttcttggaggaccataagattttcttgatggaataggaattgaagattgatttgaagctgatataattgattgcattgtaaaattttattattaatttttattaatattaatattattgctattattagggtataagttatataagtgaatatatgagggtatcaaaaatgttatttgttttgtgctgaatgtggggggattatagcaattgaatgtataataaatatagtaataattaaatcaaataattatctctattaaaggaattgaccaagggggatgatataataaacctgtggggtggttgaaaaatgtataaacagataaacttgtgtaaaagtagaagatgacctatagatataagtataaatataattctaattataagttgaagaaagtagtggttatttaattcagatagttaataaataataaaatcaaggaatagcagaccataatataggaaagattaaataattaatcaagaatatagtacaaaaagtaacataatattaataaaatgattgttagagttaataacaatataaaatcgtaaataatacaatgtcaatgagaaggtaacagtaatagcaacctgattataataatagacctttgaggtggataaattggtcacattggtagaaaacaactccttctctcaacggtgaacgcggttttgataagaaattagtgagtttttcaccgccaaacgcgcttggcaagggtactagtagattttaagttttcgccttagcgtgtttttggcaaattagtacgcttttcgcagggcgcgtttgtttatcttttgtttacgttttgtttacgtaacacgtttttggtttgcgttttgtttaccttttgcctcttttgagttatcgcgttttttggaattttatattttttttcattttcattgatgtagacgcatcgtcgtattgttacgtaataacattacttacgtaatatttgcttacgtgactgattacgtaataattgtaaaaatatcaaaataaagataatttaagggtaaatttccccacaatcccgataagaccgagaatcatattaattgccattgcatcgaatccattcattcgcatatagccatttttcttttcaatttattaatcattttctattgtcttttgaaattctatttcattttaatactgtaaattaatattgtatataattttcgtgttcctaaataccctttgcttttttttgaccctgaattatcgatttggtgtgaagataatttcaaacatttttttcttgcatttttgcttattaaaaatctatgtactaatcaaataatcatttcaacaaatcaaaaaaatcaataccataaatagataaatagataaatttcataaacacaaaattatatgtcaaaaaacgataatgataaaaatatttttttccattcagattcatttgaattatgtgaacaagatcgatggttaccaattgcaaatgttgatagagttatgagattatgtttacctgaaaatgctaaaatttcaaaagaagcaaaggaatgtatgcaagaatgtgttagtgaatttatttcatttataacaagtcaagcagctgaaaaatgttcaattgaaaaacgtaaaactcttaatggtgaagatattttatatgctcttttctcattaggttttgaaaattatgctgaagttttaagaatttatcttgctaaatatagagtttttgaattagatgaagttgaaaagagaaggttaaaatatttagctaggaaagaaaaattaaaatgtgataaggttaaaatagttaaacctaaaattgataataataaacctacaaaacctgcaattataaatgatattttaagacaacctccattaagtgtttatgaattattatctacaaataatgctaatgaaattaataataatgaaattaatagtaatagtaatagtaatactaatattaataataacataaacaataatattatacagcagaattcatttcaaggcattgatgaagaaatggatgatgaaatagatcaagatataagtcaagatatagatcaagatatagatcaagatattgatcaagatataagtcaagatatgtattggtcactccaacgatctgatatgccactgaaggtacttattgatgatcaacagatagatagcataatgcaagaatcttccatcgatgaagaagattcatcttaattataattaatggggcaaaataatacttaataattttttactacttcactttccttaacttttacgttcttttactttactttactttcctttactttttctatagactcttataataatgaacatactatatcttttgatgatagcacaaataatatctgctcaaacactgattattcaattaactgaaaatacaattggtttaaaatttttgaaaaaatatgatacaattcttaaattatgctcttatgaatatttagagatttcaaataataaatttcttattgggaaatttgatactaatttcctcaaatcaatttattttgatactgaagttaaatcaattagtaaagataatcaattaaatatttgtcaattgaaagagaaaaataatttaagttatgaaagcaataacaattatataatgaaacccatacttgaacaatcatcacttataaacaccaaacctaaggatacatcaccattagttcaacattttgcaccaagacatttagttagattaacacaagatcatgcaattaaaaaaaagcaagaaatgaattttaagtatccttcatcatcacctgataggaacgacaatcataatatctatctacttgatacaggagtagcaacaacacacccaggattttatcataaaaaaattattaataagacaataatgaagtataattttacccataatttaaataatgaagatattaatggtcatggtacatcaattgcatcaattatactatcacaattattaggagtttgtaaaaatgactgtagtattataagttataagataattgatgatgatggagttggatatttaagtaatcttattaaaaccttaaaatatattcaagataatgaaactaatgggatattattattaccatttataagtgagaaaagtcaaataataaatgatttaatgtatacattcaatcaacaattgaattatactatagttgtgccagctggaaattatcaactggattcatgtaattattcaccaagtagttcaaatgatgtaattacagttggatcaattgattcaacgttagataaaatagctgatttttctaattatggtaaatgtattaatatatttgccgatggtgttaacatgttaacattatcaaataatattaatgataatataccatttgatatatttagtggtacatcattaagtgcaggtattgttgcaggagttttaagtcaatggttaaataattatgatgaaattaattttgatagtaataatgatttaattaaaaaattggataatttagcaagtaaaggtattattcaaccaaataaatatttagagaatagtaaaactgttaataaacttattcaaatgatatgaaaaatgaagaacatgaatatctggtgtagcaatgtaatattatcgttttataattggtagccaaattttttcaatttctcacacacagtgagaagaaaaatacatgtcaaaaatgcaccttaaaattctcacactgacatgaaacagtggctattagtagaatatttatttgtgtatagtactatatatagagacatgtttgactatttgcaagtgcagtaatgaatgtttgtatacttttatatgatattcatatagtaaaggaaaatgaaattaaatttagtacttgataatgttgtattacaatcaactggtgttgaagcaatttatgatgatataacaactactataaccagtacaattacagaaactagtacattatactatgaagctattccaacattaataaaaagagcacctgcaatgtcaacaattacatcaatacctattagtactagtactagtagtaatacatttgataattctaagagtagtggtaaagcagttgcaatagcggtacctattatagcaattatgatgataattatagcaattataattgtatggaatgttagaagaagaagaggttatgatagtgaaaatgatgatgatgatgatgaaatgtatgttagtagtgaagaagatgaaaaggataaagagaaagaaagggaagttaaagataatacatataatactaccaaagttaatataattccaccatctacagccacatcctttgcatcagtgtctaatacaataccatggaataagagtgtaagagatacatcaccgtttatcacactaccaagtgagagagatattgctatgctaaagactaataaatagacattacgtaatacatttttctgtaaaacatgaaaaaattgaaaaattgaaaaattggaaatgagaaacagggcaaattaaaatttaaaatttaatttaacgtccataatacactacttattattattgatgattattgatggttattattattgatgattatatatgcttttcttcttttgaagtttttccttaatttgtttgtttgtttgttagtgtttacatcttatatactgtctatataatatattacttatcgcatcttcaactatcccactattgtcactcctttactaagtaatataatataactaatataaatcatgcaaaaattaagagtattctcaaaatcacattcaaaggataaagatcaatcaaagagaatatcatccgatatctcatctccaaaacctgatttccaatctaatttcttatcatcttcatctccatcatctccttctttattaaattcaaatattactgatgaatcaaatggtaaattaagtcctgaattagctccaattgtttcactgttatctgctcaatctcatagaaaatatattgaaggtgttttcatgttattaaaagatttaaattcagatggtgaaccagctgaacgtaaatggcttgaagtttatggtataatgattggtaatgaattagcttattggaattcaaatcaattagaaaatgaatcaaatagttcaattattttagctgataataaaccttcttatttaaatttctcagatggtacttttaaaccttgtatttctttaccttcttcaaatggttcaattaataatgttattgtcttatcaactactcttaaaaatagattcttattacaatttcaatcggataatgaatttaattcttggtgttgtgcctttagattatcttcatttgaatataaatctttacaagaagcttatactgcttcattattaagtacaagaggttccctattatcagatattagagttatcttatctgataataaaaaatttaattatgaagattgggtaagtgttagatttggttctggtatgccttggaaaagatgttttgcagttattgaaccaagtaaaaattcaaaaaagaaaaataaaaatggtttaatttatttttatgaaaatgaaaaacaatcaaaaaaattattaatggctaaaattactaatataacttctgtttatgctctttatccaagaaattatacaatgattgataaaagtactttaattaaactggatggttcaattcaatttgataaaaaggatagttcaaataattgttcaattttcttaatgccagaacaacatacttcagttcctggttatgatactttaataagatttttattacccatgatggattcatttaatttatatggtagacctaaaagattaaatgccaataaaaatgatattgattcattattatttggtttacctgttttaccaaatgttcattatcttaatgttgatgatttattatcaattattaaaaataaaaattcattagattgggatcaaaatgaatggaatttaaatattaaaaatattttacaaaataaattaaaaaatggttataaaggttgtggttcaaatgatggtattaatggcgctgttgatatattaaattcttcaaaagacatggctgatggtaaaattaaatttttcattaataaacctgaagctaataaatatttagaaaatagtcctcatgctaaaagtttaaatatcaattcaagtgaagaaattagtacaattgatcacgtatctaaaattacagataattctaatcataatagtaaaattaatattaatgtccagaatgattcactttattcaccacaaaaatccaatgatgttcattcaactcctcaaaatgattcaacttttatatcaaataattcaccttctcctcaagttgttaatatttatcaaaaatattcacaaattcctccaaatgatgatataataaatgatgaaaataaaaatataaatcaaaacatacctcaattatctaataacatgaatcaattaacgcttgataatttacctaaaaaacaaattaaaaagaattcaacagttgatgatttctatccaacaaatgaagatgaagaagatgaagatgaagattatgacgaagatcaacgaggttttagaccagaaagtgatgatgaagatgatgaagattttgcatttaaaactccaggtcgtactaatatggatgaacgtatattttcaccatttacagattttaataataatttcagagatgcaattcaaatgaaggagacatcaccattaacaaaaaatcaaatttctcaaccaataaataataagtctaatttatcattaaatatacctaagcaaagaactaaagaagtttcaaataataattcaaatgatttttatccttctgaagcacttagtgagagtaaaaaagttgaaggtgttaatagatatttttcaactccaacaaaggaaaatgaaagacctgtatttgataataaacgtgctccatctgataatatagtcaaacaacatgctaattataagaataatcaaaatgtcaatacaaatgataatttccaaactccaactaatccatataatataattacaaatgataatgaaatgatgagaccaataaagaaacaatatgatcaaaatgataatctgaatagtccaattaatggtattaatagaccaccaattccacctcaacatcaaaatttgaattatacaaatagtccagaattagttccaccccatcaatataaacaaaatcataataataacagtaatgaaggattgaataataataataatagtaataacaataataataataaacaatttaaaaatataaataataatccattagatagtccaaattctccatcattcggtgcatatggtccaatgaaactaccatcacctgcagtgaatggatcatcacaatttgcaagacaaaattatcaaccacaaatacaacctcaagtacaaccacaacatcaacaaccaaatcaacaacacaatcgtccaacaaataatcatcatcatcataattatccaccacaacagcagtatccaccacaacaacaataccaacaacaatatccaaaccaatatccaccaccacctcaacaatatcaacaacaacaatcatatccaagacaaaattatggatataataattataatcaaggatataatagacaatatcccggaggaccaggtccaatcccaggtggaatgccaggtggtccaatgggagctccaatgggtggatttcctccaaatcaaggtcaagttcaaggtcaaggtcaaatacccggtcaagctccatatggaatgccaggtcaatatccaaaaagtaaaactcgtaggccaccaccaccaagttcaggtaaatcatttaaacatgatccatatgcgttaactaagaagtaagtgtgtaattattaaattattatgtattatatttaacaattatttaaaaataaggtaacttcagtattataaatttatttatatcatcagtatgtaaattatataaaataaaaatgaaaatgaaaataaaaaatctaacaagttttaacttcacgatcttcttcaattgacataacatttgaattattttccagagttgaaaaatgagttgatggtaatttaatttgataacctttaaagatatcaaattctttctctactgatgcattatcaattgattcaattgttttacgaaattcattttgatcacaagaatcttttaaaacaacaatataagattttaattcagtatcatttgcagcagtcattgtatttatttattcaggttaagtatacagaaagaaacaaaagaaacaggagagctaaaagaaaagaagttttgccatcaaggagtaaaactctattatttaaataaataaaataccagggcgaggttaattttccttatcacaataaaaaaagttacttattttaccaagccaccaacaacatcggtttaccgatacattattaccttaattcactttctatctctcagatccatcatcacctatttcaccaacaatttgtaaaactttacgtatttgacctaattcaggatctggatcattttcaacacttaataataaactactcaataatttatcatcaatttcattaggatctgtattaatacatataccaattatacgacgaaattgtgcttcaagttctttatttaaattctttctctgtttcattctctcttctaaaattgaattattttccttatatgctcgtatacgtgcatcaagtacaacacttggtggtatatctttaattatttcttcaatattgtccttttgataatgttttaaaatatcattaactgatatattctttaatatttcaagttcatcaatattttcatcttttatttcattgtcattattattatcattattattatcattattattatctgtatttttttcatctttttgagatttttcaatattttcttgtaataattgctcaacaattttttcaacatcttcatataatgatacaatagtaaatggttgatctgcgtcaaattctcctaaacaattatcttgattaatatcaattgttaaattttgaatttctgtttggaattctctttcctcttcctcaatcgctttatttaaattttcaattttattattcattttagttattttaccaatcatattctgtaattcatcatattgtttacgtttatatgataattctaatgttttctccttcagaatcggatttaatctatcaatttgttcatatttttcattcatttcttctcgaaactctttaccaatattatcaataaatttttgcattgaatccagtatttcaagactattaaatttttctttaaactcactaccagagttaagtttattatttacattgttatcttcatgatctttcctattattggtattatcaccatcactattattattatctcgattggtattaattttatcattttccccatcactataaatagcattagacttattttcaactttaactttttcattaattgaatttaatctcccatcattaatgtctttgaaattttcaggatctttaaaagttgataaaaatccattattaactgtactatcaacatcaataccataatcaccaggtgtgacaccaattttatttgctttataaggatcagcaccaatatctaataattgtgatacaatatatttattacctgctaaagttgcataattaagacatgtattaccatatttatcagatttattgacaacatctttaataaaatttgttaaagttaatgaattatttgattttactttattaccctttttaacaacccattctaacaatgtctctaaataatatttagatgaatcatatctaccctttaatccacatgatattgcaatatgatgtaatatagttctacctctattatctaataatgtaattgttggatataataaatctaataattcactaaaacataataattcaaaacaattggttgtatgaacaactctaattaatgcagtttgaccttcattatcacctctgaatctatttgcatgtttattaataagttcttcaactaatgaaattttacctaaagttgcagctaaatgtaatgcagtttgtccattatcatcaattggtacatcaatattaatttcatctttatcaataattgatttcttattagttccatcattatcttcatcaccttcaattgaaatttcatttgaaagtatttgatctaatgtaacttcattttgatatggtaaaaataatgatgacattataacttttgaattctcattaacgagattatcctcatttaaaggtttcaaggtaaaaggagcattttcattaccaagcactaaatcatgatcaaaatatttcaactctgtatttaataataattcttgctttgaacgttttgtaggactttgaggtgggttattattatcatcatcattactaccatcgttattgtctttattattattattagtttcattacgatgactaattgaagatttcctcttcattggagagacattcatatcatcattatgtttaattacatcatctttattcaacgtgtcagtttcgtgatcaacgtgttccgtgtcgctgattggttgagttggtaaaaggggagatacagtaacatcctcatggtccaattccattccattttgaccatccatcttctcaccattgtccaagtgctccatatgtgacatatccatatcaaccgtatccattgtagtcattcaaatgtaaagaaacagtattaaaaaatgtccaccaaaaggaaactgcataatataaaacaagaacacgcaaaaacgttaattttacactctctttgttacgtaagcgtttactaagaatttatatggggaactgataatagatttattatcattattatcagtgttaattaacatggtgtttaattgtaaattgtagtagaacagtagacatagatgagtacagaggaggaaccatcaattacagacatcccatcttccctcaaatcattggttgggagttatattcaaagagctcaggaacttagtaatgtacaaccacttgtatcatatttctgttatttgtatgcagctcaattaattatggaatctcaattacatttaactgattcaaatgcaacaatatatattgaagtattacttaatacaattgaagatgagagaacagaatttcaagaaaaaatgccacaatttatggatgttttatcagataaggaaaaatcatttaaattaatattaggattttcattaaatattttcaaaaatgctgttaatgcagttgaaactcatactgcaactaaggagacagctgtttcatttaaagctttcctgacatttattgaagtagttaaattatggcctgatttttatgctactgagagtaatgaaattcataaacatattaaatatgctaaatttcatgcaactagaatattaaaggcattgaagaatggtactgatattaatgattatgcaactgctgatgaattaaaggaattagaagaattagaaggtggtgaaaataacaatgaagaagtaaatgatgaaataaatgaagaaataagtaaagaggaaactaatgatagcgcagtcaaattaccaactccaccaaatgatattaagggtgaattaaaaatgccatcaactccagttttaattaagggaaggaaaaatagtttaggattaccaacagctccagaatctgatattaaaccagaatctccaaaattacctgaaaagccaaaatctacaatacaaaccactatacctgcacctgtaattgcaccatctaaaccacaagttcaatcaaatccaacaagttctaaaatactaactaaggaagaagttcaaactatttggaataaagaggagattatctcaaatgcacaacgtaaggctaaatttgcaattagtgcacttaattatgaagatattgaaactgcaataaaggaattacaagctgctttatcattattacgtggtgaataatttgttttcttttatttattatttcttactaattaattaaataattaaactctataaaaatttgtttaaatgttataaaatacatgtcataattctatcttacattatcaacattaatatcattattaccaccatcagttgtacttctatcaaaatttgcattttcagttgaattactagttgaatttcccactccattcccagttttattaattgaatcattatacccatatggtgtatattcagttctaacatattgtactttattattatttaaatctgtgctgctataagaaccgtatctacgattactgtaaggatttgtaaaatttgaattataattgatatttggtggcgggggtatactattcattggagcaggtaacgaaaccgaggctggtactgcagttacaggtattggaacagaaactggtacagcaacataactagtattagaatttgtacctaatcttggccgattatttgaattagcgtgatcattactgctgtgactgctatcttcagtattagatagatacattacattcctattagatgtttgttcatcatattcatcttcatttattgttttaatagttgaacttgggaaactagattgtgaagaataaagtgaactttgttgttgtgaaatagtagaaatagttctttgcactgtatccgaatttgatgtagtgggatttgtacttggattgctattaaaatcggcactaggatatttaatcagtaattcctgtgatgtatataatggatatttgggtggtgtggggaatggtgtatattgtaccatatttggtcctgctatcaagttttgggatgaattaaaataatttggcggtaatgaataggaagaatatttactccaactatttgaacttgagctatatcttgaatctgttaaatttgaaggtctctcttcaaaattattagattcttcctcaattttggctattgtacttttaggagtatcacctcctggtatactaatccttttttcattatattcaccatactttccatctttatcttgtgaatttttttcttgaatgggttccggaatattttgggtactttgaggatatttgggaattattggttgatagtaagctttactataaacaggggtgttgaatagaattcctgggacgttttgcggagtttgataaatcgcactagcagtagtatttggaggatatgtgacaatcggcacataatgtgatgtttcatacggttgtgacatcggtatcaattgattgttgtcgttgttgttgttgaggaggatattgaacgtgaatgggagcctgtggagggtattgaatttgtacagtagctggtactgaaagaggtggtggcggtagttgttgttgttgttgttgttgttgaggttgaggggattgagattgttgtatctgcggcggtggctgaatttgctgtgttggttgttgttgatattgttgcctgataagcatttgttgttgatatgcattgcgcattctcgattcattactatcataaactattggtgcaggttgaatcatttcaataggtggtctattaaaagtgtcaatcatattaccattaataggtattgccattactggcttaagctgtgtttgtatttgtgatttataattgtacattttattctgttcgttaacattgataatgttattatcaatactaatattattatgattattattgtaattgtttatttgttgttcattaataataggatatgaagaatttattccaggataacttccatcataataatcacgtttcacctctcgatcatgagaatctcttcgttgattaaccgaatcattgtctttatcattgtttgtattataatcatgtgcctgaacgttattctcattatttgaataatcaacaatattatatgaaggtatatcagggtttgataatctaaataatttaattgcttcttcttcagcttttatcctttcaatagttgctttattcagactaccccttggtcgtcctggccctttacgtttatttttagttattgagttagtagatttagagctagaatttttattagtaatatcgtcattagtttttttattatgatgatgacgattattaattttagactctgatgtaacactaaagtcttccgactttgaaattttattgtctccagcggaattgatttccttattagactgaacagtatttcgttcattaattgggtctaatcgcctcttagttgttgtactatgcatattttatagtgtaatattaatgggaaaactttgtacagaataatactgtttatgtaagggcagaaaaagaatcccgtgatttcaagagatgttcaatgtagtataatctgggggaaaaacggcacagtttatgcttgataactaataaattatggctggttttaacacgatatgtcaaaaaaaaaggatttattttttccttctctattacactatggactggctttctcagatgtgtatacactatatgtgtacctgaatatgggatctcgatctatatttggtaagtatatacgaagaatatacttgtttgtatctgtagactggatctttagggaaatgtagtaacactctatatattgaaaaagaaaagaaaaaaaagtaatcgatcaatcagcttgagagatacattagtactgtgagatataataagttattttgattgatattatcaatataaaagaaaacaaagaacaagaagaaaagttttctacatgcacaaaattgtgttgcttaaatcttgacaacaaggcttaatttccttagttacactaataaaaaaaataataatattaaaattatcatgccttattgtcattacatgatttattgttcaatttcctgcaatgtcccagtttaatccgttagttttaaataactctaatttattatggaactattttttagactacattttcagtgttattacgatatctacaacatatctacaccaggtaggcaacatacaaacttatctaccaaacacgtgcatgaattccaacttgtacacaataacaagtcaaaaagtgtgtaatttcccatcaaaaagttcgagaaaatttgagaaaatcaattttcgtcatcttaagaaaaagaaacgagaaattgcacttttcccacccctcttgttaaaattcgctgcaatctgcgctaaaattaccaaaagccgtagacctttttccggtttctgaatcaaagattctatttatatccgacaatctaaggttaattatcggttcggttttattacttatcgttagtttgattgaattacatattttattatcgtaattaacattacaatgttacatactttcggaagttcggcgactgccttcacgtagtctctttttcagtcgttcacttaacatcgaaacatcagcaacatcactttcaatatcgtcattattagaatcattcagactaataactctaccatcagctccgacagtgtatccctctaaggttatcgattgtgttccagagaatgtttctcctttttctttttcttcttcttcaacttctttatgtacaatccctctaacttctaatgttccatcattgaattcattatttatagtattatcattaacaccatcattatttttagaatcacttgtatcagtagtaccactactagcagatgcactattgattgatgtaacaattaattccttcaatttattcctcttctcaggtaatctagagttctttaataaatcaatagatttctccaaatcaatattagtattttgaattctttcctcctttcttctcttattctcttctttaactctaatagattcctcttgtttcctttccagttcttcatatgcaatattctcctttgaaactttttcataactttcactaaaatcagaaaatttttgaaagaaagaatttctagcaaattcatctgcatctggatcttccttaaaatatttcataacattattaaacatttcaatagcaacaatctttttatcttctaatttagcaacatttcttctcatagttggtaattctctataaacaatctttaaaaatttatcctctggatgaaataacccactattacttaaattaccactacttaatgatgaatcaatatttttaacgcttgaaattaatccaagacaatctttttctaaatgttcaattgaaatttttgatgcattcttgactggttgtaaatctttcaaaaattgttgaatttcagggaaatctttacgtacaattttctctaagaattgtaagaatgacattgaattattattattcttcaaaaagtttaatctctgtaatgtacttaatctgaaaccaaatgccttcttattatctgtattcatataattacctaataataaaataacttcaaataattgttttaatgcatctgatccttcaatactttgagttgctttttcaactttacttaattgttcagaaattatactataatcttccttgaaatgaataaattaaatttaaaactctcatacgtgatctccaataatgatttaaattgaaaaatgtttctaaataaattctatcagctcttgctaattcatttggatctttatctggtttagaaacaataccttcagaattccattcatgttgaatatggttcaagatttttacctaatgtattagaaatctcacataattcagatttacccaataattccatgatttttcgccttactagtaatctctggtgaacaatgtaaaatttttaaaacaatttcttcatctgtatccttatgcaatggttgtaaacaaatattaaattcttgtctctgttgttgacttaaaaatgatttcttttcaactgcagttttagtattacgtggattcatcttagcttcatatgcagcaaataaatcttccatattatcaaaaattcctttctctctaaatttctcagcaaataatgaaatatccatatctgaccaaagtgaattgtcaatatcatcaatcttttcccaatgtaattgctttaattttttcttggttcttggtaaatgatcaaatggtgatgataatattggtgacatcattggtgatgttttcctacttccaaatgataatggtggtggtggaggtattggtcctcccattcctggtaaaggaggtggaggtggcggtggaattccgcccattccaggaggaggaggaggaggtggtggtggtggtacacttgcattaccaattgaaggaaatgggggtggtggtggcggtggtggcggtggtgataggtgcaatcgaagaattattagttattgatgctggaagtggcggagctggaggaggaggtggaggtggaggtggaacagtgttgacatttgaagatgaacttactagtggaagatcttttgaaataggtttagattctttaaaaatatttttatcatcatgattatcatcactaatttcagaatcattgttaacaatatcacttattttcttaatatttttcttcttctttgaaacgccagtgatattatgttcatcatattcatcctcatattcattatcagtcttcatcaaatttttcatctaatggtgaatgtagaatcatatgtcctttctttggatgattcatcctttctattctagcatcattatggtattcaacaaaatcatcatcatcaaattcatcataattttcagcattaaatgaagaaacagccgacattcctgtacttgctaatgttctttggtatgatatttctaagattcgtggttgaaacttatcattgaaattttgtagtttcgaaacttcagtcctcattaatcagatgtacttacagtggtattaacatattttctagaattttgattttgattaatagtatgagaacatcactgatgagcataaatcgtcttactagtagcttcagatttaccattatcatcattatcatttgaaaaatcaggtgtaggttgtggtcatattaaatggtttttgtttagcaactttttgttctaactcacctaggaatggtttcatttcttgaacatttaatttattaattgtttgaggagtaacaactggaccagcagaaaattcagccttagggttgaacttttgaaccatttgaatatttttcttcaacatcacgtataattctttcaggatcttcatcataaacttcatcatcctttaaacttaattggaatttcaaatttgaacaaagttcctcgattccatttaattcagctcttaattgtcttgaacgtgtagtatctaatttttcaaacgaggtacattgcaggatcagagtgtttttcttggctttgatttattttcattatcaaattctaactcttgaatttttaaatgaatcaatagaactttgtaatttattcaatctatccaatgcttcaagtttctttctttctaatgattcttgatgttctaaatccgtttgtaatttaataactttattagcatcctttttgaagaaaatctaatctttttcttaatgaatttaatgtgactaaatcaggcatcacgatcttttaatgatctttcctttgataaaacaatagccggaggttctggaatactaccaaggaactcatcaaaatccatattttctaaatctctagcttccttttccaaaccttctaatgcagacatattggattttaaatgttgatgtttactttttacctggtgtatatttagaagttgatgaagttttcctatgatgctgttggttttaatgttgcaaattgattttcctggtttctccttactatgagcagcaattaataattttctaatttcttcttcattcttttgcttttgaaggacatttttacgattaaggttttgaatttgattttccttaaattgaatagttctcttcataccaggctaataaattatctctttcatctaattcatcttttaatctttgaattaaaccattagaaccttcatcaagttgatgtttaatattatctctttcagcttcaagttcttcaactctccgcttagcttctttttgttcctccattgctctttttgcaatatcatcacttctatatgctgctaacaatttgttaatactgatattcatattactattctcatctgaatttgacattgtgatattactaacaaaatcattggtcaattttaaatttctcattaaatcttccggatgttcttcaactaatgtatttgcattcaaaaaaatattttgaactaaagatttcaattgctcaccagttttagtatttttggaactttcatataatgcttttaataaagatactggatcttgaaaatttatttgtttcattttaaattcattagttttccttaattccaattcatcattttcttttatagtttcgatatcagtaattattctatcaacatctggtatatggaataattggcatccgtctattaattcacttaatccagcattttccaaatatgctctcatttggaaacgagaattcaaatttctagatttttcaacgaaaaatcttattaatattaatgttgcttctgtatattgttgaataaattcattatcaatagtaacctctatactcaaattcaggaaataaaccaactcgagaacccattttaccaaaaccacgaagtgcacgtaatacacaccaaatccaagactcacattttgaaacattaggtaaagaatttaagagaatttgagaacgatcatcaagtctaaaattggttcgtactatttgtataatattctttgatgaacatcagatgacaattttcattcacattcttttttagtgttctaaatacatattccgaagtccccaattacaaatgaataatgtgcaataatttttgatgcaaataatctaattgaatgcaactggtgaaaacataccactaaatatcactggtatgaaaagtgacaatatttgtaaaatactttctgaacctacagttgataatgcaatgactttaatacatttaaacaatctttgttctttttcaataatggttttataagtatcactaatgttgataaaagttttttgatttttcattgattgatttaatggagcagttaataaaggtttagttttgtatagattgttcagcacattacataaacatacagcaccatcttttttcaaaaattccttcatccattctaagtcttctgatgttaaataaacgtataattcttttaattgatcagatgtaataggtgttactcatcagtaaagtaacaaacgccaatggttcaatttgtgaatgcatctgtaattgaataggatctttccccttcgtaggtgatttggtttcattttctcttacatgttgacgtttgaactcggtaattttttgttgacggaataagcatccactttctctcgactgaatagttcagcatttctacccttgctctttctggaattttttcgaattctcttgtctgcataacttcagcgaacattctttcaattaccgcaggatcatcaggacgttctaactcaaaatcatctgagattgtatgcctatgtgcttttctaaatccaacaccagaaagtttcttactatgtgactgtggtaataaatgagaaggattattagataagaaactagaattagtagtgtacttttgataaattatcttcatatggatgtttcagtttggtttcctagatcttgaaaaaaatgaagatttacttggagtttgatgggatgatgatgcaattgagtgttggaaatcggataaatttgaagaattagttgtatatcttgataaattaccatccaatggttgagggtggctaatttgtatttgatcaaagttttgggatgaaggttgtgaatttggattgttttgttgtttagaatttttccgcatactacccatcaacgagttcattattccaccattggagttaccagaatctgatttcttaaatgatgaggacttcatattggaaaaactgtaaaaaataaatgagcagaattgaattgaattgaattgaattgaattgaattgaattgaattgaattgaattgaattgaattgaattgaattgaataagtaagtgaaagaattaaaataaaaaataaattaaattaagtggatataatataagaattgaatgtattaacaacaattgagttgataattataagtatatgtacagtttaatatcaagtggaataatatagtgtttgaagtgacttagtgttatctttaactatcgtttcactgaggcgaaaataagattgtttgaaagataaatgactagatttaattgatattgatgtagttttgagaaaacaaagaacacaacaggagcagaaaataaatagggtataatttccagtgtgtcagtatcttcaaaacacgttaacaatagaagaaacagagagatatttcaagagcaaagcttgtagacacttcatcaatcattaatatatttcaattcatcaagtttgtctcactgtgcatcgggaaattccaattttttaaatctttggcaaaatgagggacttgcgacatgtttactgtcgtgtcatgacacgtcattttgtctttcattgctgacatgattttctaatatcgtttgccagttttgggtatttttattttaatctgtttatacagtgttaactttttttttcgtttttcttaattttattaacacgtataggacatagttaacaatgtcttggaaatataatgcattacctgataccggggatagtccattgcctcgttataatgatcagatagaggatgaaataagtatattggatccaatgtctattgaaaacgagaatgaacaagaatgatataccggatataaatattcttggaggaacatctaatctcaaacacgcctttttcaatatgacaaacttcgattgttggtgctggtatagtggggattcccatggcttttttgaactctggcctgttaatgggaactattttgatgatcattttaacatttatgaatgattggacattacgactgattgtcgttaatacgaagctgtctggcttccaaaacgtatacgggatgtatttcacatacttatggtaattttggaaagattgtggttctcttttcacaaggattctttgctgttggggggagtattggattcactattattattggtgattcaatacctcatattttaagaagtgttttttcagaacaagtgaaagaatcagcattgttatcctttcttttaagtaggaattttattatcacattctgtatttgttttatttgcttcccattatcattgattcgtgatatatctctgttagcaagagctagtggactggcattgattagtatgctcatgattatttcaattgtgatatttaaagcaccttttgttgatgaaatatacaaaggtagtatctcaaatcgggaatatatatttaataccaatatatttcagggaattagtgttatctcatttgcgctcgtttgtcatcataacactactttcatctatgactcaataaaagtaccaacattagatagattcaacagaatcattcactactcttgtgctatatcgggatttttatgtgcattgttaggtatttgtggtttcatgaactttggggataaaactagggaaatatattaaacaatttcccaaataatgattggcttatcaacatcgcaagattttgttttggtttaaatatgattacaactttgccattagaaatttatgttataagagaggttatcaaagacttatataccatttttaaaagaagaaaagagccctcctttgaagcccaaaacttcacaacatttcagcatgcatttgtcacatctattttattacttattcctttatgtgtttccatactgacatgtaatttaggagctgttttagaaatcgttggtgcaacttcaggctcacttttagcatatatactacctccactttgttataataaaatgactaaaggaaaacaagtcaaaattacagcaagctccatattatgcgtgtgcaacttttgggtttatggtcatgattttgtctactttccagacgatatcacaaagcatgaatagttcgtccggaacgaatcactgtgcagaatgaatcattttttcttagaactctatataagctttataaaaattattcagtagtgttactgttaattaaatcatgaacttgttttaaacttgcaaatatatcaatttcagctggcttcagtggattctgataggttgtattttatcactatcagcttcatcaagtagcttcattgttttctgatgactcaacaatatcttccatagcatcattagtttctttgacaatatcatcttcacttgaatcagcttcatcacttaaatcctcatcatcactaatgatattggttggcttacgtttactaattccaagtgtttcatcatcagaatcatccatgttttcatcatcatcggaagaaacagaactattatcgtcagaatcattttcagattcatcgtcacttgttattatcaacttcattattatcactatcatcagatttttcattgtcactatcattttccacatcattatcactattactttcactatcaccttcactaccttcctcttcagattggttttgagtaccttttaataagtttcattaatgagtctgtatctggtttattcagtgctgcagtttgtgggacctaattgtgtattttgatcaccaactaaatattcatctaaatcactaacattttccaaatccagggtattattcatcagagaatcatattgttgttttgtaatttgaccatgacgtttttgtaataattcttgtaatttcatttctctttcaaagaaaacttcatcatccatatcttcatcactatcttcaatcctatctttggaaagatgggctctacgtaaaatttcagtatcagataaaacttcatcatcatccttgacaatctttcttctttttcttaatttcttcttatttcttagcttatcattctttgatttgtgtttcttttcctttctctttttgcccatagcaactaatttaccatcagcagtccttttcattgctttacccttgactctgttttctgaatttttaagtgtagcttcaagcatttctaattcagtccattggcgcatcactttcacttcctgccaaatcatcatcatcaccacgcttcatcatcagttccgtcatcaataccttcactgccatatccatgatgaccatcagaagtcggaatcagaatcttctcccatacttctcttatataattttcttttttgtttgtcctagataatttggatcgatgaaatttgttttctagatcttcgtcattcaatggaagtatttattgcaatgtcaatcgactgtttatatgagagtaatttgtttgaatcacgtccaagaagaacaccattaagaatacctccaattttacaaagctctctgaaataaggatccatattatattctttgaaaattaacccttgaagtctataactacccaactttccaatcaattcagtggaaggtgtgattgcatgtgttaattctaaataccattgggataagaattgaacaagtgactcaacaatatgaattttatccttgtaaaataagtatgatacaatcaatgcaatcttttcgttatctgaaatatgagcatcagcaaatgaaatatctttattaccatgaaagtcagcctttttttgttctttttggttcagaccgccagagaatggatcgcctgaaatataatattgtctaatttctaaatcggtcatctcattgaaagacattggttcaagtaaaagatatttagaatttgttagtgaaagttttgtaaaatgatgcatgaagtaattaagtaacataccaaactctgatttcaacttatctgatatattggcagtcttcaattcatgaagagcatacatgaaatccagtctaaccaacttcaaaatatttgatttccaatcttccaataatttactgaagtatgataaacaataacctaatttcttttcatcaatttcattatattgtaaaaataaccaaatatgagtggatacagtatgatcactgaataaaatagttttgaatttgtcacataagttaatgtctaactttttcagcttaataacacgtctgttattagttaatccttccatatcaccaatgaattcattattctcattgaaatcttctcggtttttattagataacataattggtggatctaatctagcaatataattgattgttttaaataagacattagtaaattcaatcataccgagtgcaatagatgaaccttttttatgagcagttttgtggataacgcaataatgtggtaatttcagaatcaacttcaaaaattaatctcaatgaaccttcagctcttgatactagaccttttagcagtaatttatcttcacttaggagtcttgtatcattgaatttttggtaaggaatgaatcatcagtagtaaattgagaatctctttgaaaatggaaattgtgaatattcaaacattcataatttttgatttctagaaaatgaggtatagttctattcatcatcatttttaatgaacgtccttcaaaacagcaaaataaatatttgaatctttctaagttggatatacttttttgtttatgtgattggaaggatttttcatagtttagcatccagttgataacaaagaaataatgataatggaacgtaaaatcatcggatgtatctctattaatgagaatattattgatctctttgaacattatatgaaatccgttttccctaaaatcgttcacaaacttattgacaagttttctagtatctctattgagtttcgcaaacttctctggttgatctgtaagtccagatttttgtctatttatatgtttacctgataaagtctttagaagcgttggaatctaaaactgataataaatcagttattgaaaagcttatcttgccctgaaaaaacacggttagtatttttattatcctgaatattaatcaaagaaccaaagtgtgcatgtctggtagagctacgtgatttaaattttcgtagattgtcatgttcttcttcctgtagtagtaataacttagagttagtggcacttaatgtattttcattattctgtgattctgatggagcatcacttaatcttaaattttgagccaattgctgtgttttgcttaacattgtatttgtatcttcagctagttcagttggatcaacaaataaaaatgtgtaagtaataaaaatctaaacatgaagttcctaaaatttcagtatcaaattctttggataaattagaagcaattgtttgaatgacagataaaacgtgatattttttaaagatttggaaaacaacatccaaagatatatcattttcagatataccgtttggtaacgcttgaaagacatgaacaatattacttctattttttttagcaactttagcatcagatggttgaattctcaaaacattattaaataatgtcaaacacaaatttaaaataattttatcacgtctagtcatatctttcttttctagttccaagattggcaacattaaatttatcagaattttgaatattttaccttttttatagtgtaataaacgatgtttatattcaatttgtgctcttcttaattttgtgaacaacttatcttgatcattatcgtcgtcgttttctaatttcattggagtcataagacgcactataatttctaatgtaactaaaagaattttcataatttcaggatctgtatttgcagtaccatgaccaccaaattgaaccatgattggtattaaatcattaataaataaaccactatcatgacacgcagatgcaacgttcagaacatgtttttccttcatcgacttgtttcaataattgttttatatctttcaaacatcctaaagcttccataccaagaatataagagttaggtggattaggatcaaatcctcctaatgctgatgaaagcattgaaatattacgttgaatcttctcttcgtctttacgtaaattatttgtcattgaagctaatggatttctagtcatattcataacagatgataatctgctttctctttttattaagttctttatcttcaaaatcttcaacatcatctttcatttcacttccgctatcgttttctctatcactttctaaatcagacagaagattttcattatcaagaccgaaatctttattgactaaatttttttcaaccaattcttcaaaaccctcttcttcttggccgtaaaaaacatcatcatcattattcattttcttggttgtggtatgtgtattgcactttaaagcaatctgaaaccagtttcctgttaattcattaaaatcatcaaaaatttcaaattcatgcacacgtccaaattccaaatgaattttcgcgtcgcattacgtaaattatatattacgtaatgataaatttatgatctatttcaaccttttaactgaaaagactttattttaatttaaagctaatatacattttataaaacaacataaaccaaggtaaatcattaccattactaagctattggggtatttctaatggctctttcattttcatgattggataatagtatgaaattgctattagcacgagcatttgatgtttctatttcagatacttcaatttcagattctgttgtatcaagagctatcacttcttgaattggagtaatttcaataactgtcacatcatcaatacgctcatgtgtatcaattttctcatattggttgagaagttcatcatctagtttgacattagtttctgtgagaattgtgcttgaagtgggtttttgaaaatatcatcaacatttccatattcattatcaacgtcattatcctctaaactattatcctctttaattttttcctcatccattgattctacaccaagatcatttaaatcatcatctaacattgactcaacatactccattgtacctatcatttttctgttgctgtatatgttcaaaaatcgtttcgatgcatcatatgtttctattatattcttaaaatccttatactcatccaaatttttgattaaaaatccaactaacatagatggatctactttcgtgatatctaattttcgtatacgtgtggtatgtatactttcctttattgcttctttattttcttctggaatattaccaaattcatctagactgattgcattttgctgtacatgtggatctaaataaaacaagctattactttgataaccaaaaaagtaatgtgatgaagatggtctaccaccagcaatcccaacaccaaatttcatacttaaagtcaatttcaaaaaatcccaatatacctcatttatactactcaatcccaatctaactccacataagagtaatattggagtaaatttaacattattcggtattttttccaaaactgtaccatcttcataatcatcaattgccattttgagtagttcatcttcaaaaatatctcctgagttggttgaaacataaactttcaatgtctaagtctatattagggactacttgcatcgggataactattgcataattcgaaaatactcttagcagcatttgaaggtccaaaccattcacctggctttttaccacaatattttgcagcatataaaacgtaattatgaacctgaaaacctggcacagggagaatcagcaaataaagaaacgatatcccaatgttttttcaaatcatcttcacaagattcatataaacgccattgtcttcctaatttcaaattcatcaaggcattacctaataatgattgacttgtcctaatcatacatccccaacctgaatctgaagtaaaccctttattagcattacttaaatcaaatgagccacgaagtaaggctccaatacttaaagggtttggaccatttttgtctctttcaattaaaggaaatccagccctataagtgaataggagacgggtatttaaatcatttagaaaatcttctggccattcgttaatcaaatacttgaattaaatgcattaccttttgtaaaatcaaatgttggttgtgtgaatttagttaaaaatgatttaatgttttccattggacctgtttgaatgttggatttaatattgatgtgggtatcgattgtttctgctctgcccccaatggtttctacgttctgggaattttcagggaagtggggaagttcactttcctcttcacatttcacgtaggtagaaatcaattgatcttcacccgtggaaggtttgcgaaatatctcatcgcccttatttgaaggctcagtatcagcagccccttctacatcactcttatttgtatgtatgtcaccattatcaatattttcattaatatcgtttattttgtgacttgattgatcactatcttcatgttcatcattattattttgatttctataaactgttcctaatattatcaactccgtagaatccaatgagggggtttcaccgattttcgatgtataatcaataaaatgatcccatatatcaataattccctttgattgagtctttggatcctgttctctgctcattggtgcttcattgttcatattgtttaaatccaaatacttctttaatccttgttaaacaaccaactgatgataaattcaaatcatcgattaattaaaacaataataagtatacaacccagtgggaacaataggaaatttggaaaaactgagaaaactgggatttgccatttcattacgtaatatcatagaaaaaattattatcactgattaatagacaacctggtgaacatgaactagagcagtcggtgtttagtgttggttgggaagcctaagttatataggcatttagttgtatcaaacaaagattttacattttaataatggctaatagaaaaggacgtactggtgctaaaagaaatggtggaagaggcggttctagaggtggtagaggtggatcacgaggaagcggtggtagaggacgatctcatggtgggagagcatcacgtcaagcaactttagaacaagatattgatatgtttgtcagtaacagaggtttgtcaggtgattttatagctttacagaatagaagaaatgctgcacctgttaaacttcataaaaaattaagaacttctaaattacatgaaattaatgatatggttgatttaaatagaggaaatttttcaaatgttgaagaaatgtctttaaattcaatgatgtatgatacacatagtacacgtaggaaaaagtttaaggaaaatagtatgtataatgaagttagttatactagtaaaaatagagaaaacatttttaataaaagttatagaaaattgaccattgaatttgtgaaggcaaaagaaatttatgacccatccaaagatttgatgaaaaaacttttaggtgataaatttgatgataaaaaatatagagatgagaataatgaaaccatagtagatattgaagctaatcttatagaacaaaataacgcagaaaaaagttatgacgaaaaggatgatgatgatgatgatttgtctgacatggacgaatatgaaatgagaagtggtttggttgaagtgcaaaaagaaacaactgaagttcttgatgaaaacaatattgatatgattgaaatatcagataatattcagaatgtcgtgaaaatgaatagtgaacctacaatggaatttgtgcagttggaaaaacccaccaaaaaaacagaaatgttatttgttgatgataatgatgatcaagagtttcatatatcgtattatgaagatgcagatgaagatgaatgaagatgatggagatgatgaagttgatggagatgatcagctgagagatgatgatataaatgatgactatgatgattatgatttaaacaaagatgacgacgaagttgaggataatcttttagtacaaaatcatgaagttaaaaagagttataaggatgttgatggtgatgaaattcaaattggtaaatttttgggtagtatgaagaaaaccaagaacggtgaacaatttattgaacttccagcagtgaaaacaagaaaggataagagaaattcagaaaaaattttatacgtggtagaagatgataacgataatatgggtgctgatgaagttgaatcacacgttcataaattattacacggtgaatccggaaatgttaaaaagaagatattgaggaggaagatgatgacccggaatttgggtttttggaagaagactatgtttcttttgatgtcacccaaattaaaattgaaaatttaagggtcggttccgatatcaagaatgaacagttttatgtgcaagctccgtatttacttggctctgatgaatttcaatggatttctagagatgaattttcaagtattttgacagaaaatggtttacctgaccatagagttaatgcatttatcaaaagtgcaactctttccttgatagacccaagaactaatgacactgaaatggtgtttgatgaagatgaactatatatatccgatagttcagaagaagaagaagaagaagacgatgctgattatgaagccgatgaaatcagactaaatgatttccagatacctacaaataaaaagaagaaaagagctcattatgatagtgatagtgagtcattacaaagcgatgctgaactggatgaggaactattagaaggtatggaagatctattatcaatgcatcaatctagtaaaggatcatatgtcgatcctatggatgttggtaccagaactatcagagcaaagggtaaaaagaagaatttcagacttgaaactaatactgagatcaatcctgaattccaaaaattcttggaagataaatacatcaccagaaaggagaataagaaacaaaataaagaagagagagaatttgctagaagaaataatacatacatgttaaccaaatatccatacatgatggaaatggaggaaatcatgaatgaattcaaagaatttagaaatgatgaaatccgtgaaactctgagattcccacctatggactttcatgtaaatatggttctacgatctatttctgatgcatttggatattcttccaagaaaataggtaaaggtaaaaaagaatatttagaagttaaaaaacctagaaaaaacaaaacaagagaacctgattggattagaatcagaaagctatcaacgaagagaaatgtgtgtttcagaatggatgttgaactttcacgtgaagaaaagagagaattaaagcgtgtcaaaggtggtaattatgaaattgaaaagatgaataataaaggtcgtggtaagttcagttataaagagggtgaagttgttggtgttggtgcgaaagaaattggagcaaatagtattggtaggttattattagagaaaatgggttggcaagcaggtgatgcattgggtccagagaataataaaggtattacagaaccaattagggtggttgttaaaacatctaaacgtggtattatgtaggttcaaaaagagtttcttacattaatatatagtcattctataaatcttttcaatcataaggtaattttaaatcatctattgaattcatgaaattcatccaaccactatcctttaagatatccataattgtatcatgaacttgatttggatcatcgttacattgatccggaacgaacggagttaaaatggttttatctatggtgttattatttgtggggttgatctccggattagttaaattatttagaatatttctgtttaaatctgtaaggttatgttggagagtgttagtatctgaaatactttctgtgttgaattgattattcctcatttcactttcaaactgagcaagtttttgtttatatgcaacttctttttgttgaatcataccaggaacaatagagatcatcagtcagattcagaggatgaatcagaatcaaaagttgattcttcggagtcttctctgcaccctttgtcattgttgtagttagaaggtacataattttctctaaatttctcagtaactgaaacttcttgctgttctactggatttgactgttcaacttcattttgtatcaaattcgaaatatctactcttgaattatgtgcagtaggtttatcaacattcataaatagtttcatttggcacacctttagttttttgcttttgattaattaaggaaatcaatttctcaaaaacatacattccacgggatgcacatcttgatggaaatttgaaaggatttgaaaacatttatacactttccttacgagtattttgatacttttctgatttttaaaatgtttattatcaagtaatgtatcaacaatcaaaaaaacaactgcataaacaacttgatcgcatatacttccaaagaatttatactgtaaagggattttcgtagagacaaacatagtaattatttgaattgagttattataacatgtatcataacatttttgtagccaattcttcatatgttaaaaaagatgacattaaaatattcaactcaagaacttcatgtaatattaaattcttagttgtaaactcaacaaattctatattatgtattgaatgatcacttttacttgattctttaatttcatcaatttgcttaaataattccacttctaaaaatcttaattctaaatcacctttttttaaattattcaatgatatttcattctcttttgaatagtatgtttttttaattattgcaatatcaacagtaaatcttaaatagaaattactccaatctattactttttcatctggatctttccatttagatggttttggtaaattttggaaatctggatattttaattaatgaaaatctatcttgagtatcataccaatcatatgttaaaatttcccaaaatatattttgctgtatggtatttgtaggaatgaaaaagatttaattgatatgccaaaaagtatgaaacacaatgttaaagaattacctaaaacatttccaccgagtaaaccagataatgatcttaataatgtgataatttgtattgatctaatattaggatgcgtcatataccttccacggatagagagtttctaagcctgcagcaaacaaacctttagaatatgtatcccaatcattatctgaaaaacctaaaagtttagcatcatcatcagagcattggtaaactcccaaacacattaatgaatacattaaacttaaaaataagtaattttttcgatgttttagagtaaggtataggtgatatgtttctccttatatctttcattactccaatattcatcataatctttccaaaaggcatctatatcaaatatgggcttcaaaatgctaattttcagaccatttttaactaaattatcacaaacggattttttcaataatctaattttctcaagttcatattgccaacatttagctcttgaatcttgtgcatcgtactcaataaattttttgtctttcaaagttaaccaatcctcggtattgtaatccatttgtaatgattcaggggttgaattatctaatattaaaccatttcctaaaccttcctttaatcttgtaattgtaaatgtgtatctgttccattcattcaattcttttaaattacttgttgtcttagctgtgtatttctttttgctcttgagtatcaatgttgtttgattgagcagtaacttcgtttctttgagttattagaattattattgttagtattatttttattggaattagaattatttgaatttgaattattagatgaagtattatttttacttagttttttcatttgataagtccaattccttgtgatttgagttcagttatcattgcctgtaactcctttattttctttttcaaaatttcattctcctgagaaaatttcaattcgtgttgattattattattaattagcataccatcaaatataacagtctctctggtacataaatgaccttgatttctagcaatacacctatcacaaggaatttcaaaattacatttaactttccttcttttacaatttgtacaagatcttatcagtctattagtttttttaattttagttatatcaattggttgtgactgtgattgtgattgaggttgtggttgttgttgtggtgactttttaacattgaaagtgtgtctggcattgtttccatcattacaaccatccaaaaccatggtcaaaccttattaatcagtgtgaaattgaataaaataccgcctcttctgatcatcgataattaatcaacatcttatcaatgatttattgtaaaacatgggtactctcaaataggaaataaaatccatatcaagaacaattacataagcagatgacgtaataagcaaataaaaaagaaccctataggtggctcattcatttatccaacatttatttgttacgtaatcaaagagcagtaaaagtaccttaggctatttcttgcacaatctgccatcatcgcactttttttgatttttattttttatttgcgagatgactcggctgttgccatagagaacttatggagattacccgtgcaagtttgaattaatgaataaactaacgtagtttcttttatgtttattcaagctttttccttctaagacacttgaaaagcaatgtatctggctccagattctataaaatcttgtttgcgatgtaagcagagaaagataaaggtatgttatttactattatatcatcattaatatccattttttgattcattcattctttcatcagaataatttactaactctattgatatccacttattttttaatattacagtgtagcggagaattaccgagatgtgctcgatgtgttaaagctgatattgattgtgatatagtcgataatgtatattataattatgaaactgtcagttcattaatggctaaagttgcgaaattagaatctaaggtaaaaatgaatgaaaatttacaatcttcgaattctccatatcaatcaactaatattgaaatgaactataataataatcaaactttgtctcctccgaaaactacaagtccttatggtaaggataaactaagaaactccctcaccgcttctacaacaagtaacggaacttcaagtagcaaaaataaggaaagtacaatagaggatatttccaccagtgttggtagtttgagtttagataatatcaacggatctaatagtgaatctaaacatccactaggtaggtctagcttttctagattgtttctaaggcagttacatttggatgaactgggtgtcgttaatgtaaatttggggactgataattttgaagaatttgataaatctattactcaaccgggtatcccactcccaccttttaggatagctaaatttgctattttcaaatacattaataccgttcatatttactacccctttttgtcgattaaaactttaaaagttatctttaataaaatgtattcatcaccacaagaattaacaatgcatgataaattcttagtgtatattgtcatatcaattggtttagatagaggtgagaaggatacatttatgtcgagctatgttggacaatttaaaccagtggaatattttaatacagcttatagacatttggaagaaattctttctgttagatcagaaaaaacattaaaagcattacttttggttattatttggttactgaatacagatgtattaaaggaggaaaatggggatttatggcatttggggaggtttgcaatgtctttagccatggaattaggtactcataggtataatccagaatgggattttggtacatcaagaaatgaattaagaaatagactgttttggtgtacttatattttagagagaaatatagcattgaaatatagtagtagtttatcattaaggaagcaagcaattgatactccactgccaatatttttagagaatgattttattgctgaactttcaccatcagatgcttcaagtccattattggttgtttatgataaagtccaatttaaaccttcattatttttaattaatatttgtgaaatttatggtgatatcttggaaaatttttatacgccacaggctaaattcaataatccagcattcccagatcaagaaatttttaatattaaacttcaattacaaaattcattagaccaatggattttacaagttagtagtgaaatacccaataatttaaactgttattatggacttaaaatacgttattcagctgcatcaataatattaaatagaccatccccagctataagaactcctgatattgaatcaatattgaaatgtaaaatagaagcagaaatttgtattgataattattgttgtctattggataattattggaaagtaactaattgttgcatatatgatttaaagttagttggattaactatgatatattgttgttggaaaacagagcaagattctagattattaaatcattttacaattaagatatcaaaagtatttaatgaagttgttaaatattatccatcatttacaaaatttaaaaatttatattcgattatttcatcaattgttcgtgatggaattgatagttctgaaaatacatttagtaatcctacacaacaaatacaacttttaaaacaaagatctcaatacccaatagcttatactaagttagattccaataatccaataataaattttgatgactggtttaccaaagaactttatcaagatgtttttaaacaatattcatttgatgaaaatgacgcaatttctcaagatttggatttattatttagttgaacatgtaaattttttataactaacaaaaatgtttgagctatataaaaaaaagttacgaagtaaaaagcatgagtttatgtaaagtaatctaaaaagttttcaaaatgtgtaacggaaatgtttattcatatgatctgtaagatcttctctatcaactttctcaccaatttcaatcttgttaaaacattagcagcaacttcatcctcaggaacatgttgattatctctctttttattttcataataacataatgacgcatataatataatcatagcaaacataataacacaagctgcaagcattgccttaatacctgtttgatattttggtgcctgagaatcaagaaagaattgaggaccaattaaattacctaaagcatagaataaaccaacagaaattgaattaaatgctttctttgtttgacctgatgtatttgatgaaattaatgataaacataaaacatacggtgcattatagaaaccacaaatataaacagctgcaagtgattgatttaaatgttcctttggatcaattttccaaatcatgataatacctgccattgtaacaccagttgttaagaaaattaagataaatctaacatttttaacaaaataagcaattgcagcacataaaatacatgcacccattgcaactgctgcttgaggagttgctaataacattgttctataattagagaatccaaaacctttaataataaaagtattgaaagttagtaatacctgcattaataaaattttgaacaataatgaaaacaacaagggaccaatattttggatccaagatagattccttaatatgagaccatttaatattttcagtaccaaaatgaataccagtttgatttgttgcagttctagcaactgcacattttttttcattttcatttaaggaaccaagaatcttccatattacttgggaattaagaaaaagcaagcaattccccaaacaactgtaactgatccataaactaagaacatatatttccaaattgataatgcacctttccaatggcccataccataaccgaatataccattgaaaatacctgcaaaagtatttgaccataatgctaatctaagaggttgttcctttttagtataccaagttgaagaaatgataatacaagctggttgaattgcagcttcaaataatccaaggaagaatctaacagccattaaacctgcaaagtttttacaagctgccatacacattaataaagcaccccaaatgattaataaaattgaaataaattttgataaatttttaatttttggtaatagaaggaaaactggtatttcagcaattaaataagcaagatagaaaattgtagctaaccaactatattcttgaccctttaaatttgtatcagttcttaatccatataatgcagcatatgataaacaatttttatctaataattgtaaaaacattgttataactaagaaaggtaatataatacaatcaattttaaatacaacacgtctatttaacttaagattatcagcaagaatagctggatcttctaaatcttgtgtaccattatcttcattaaaacttaaaaaaccaccttcatctcttttatttgtacttgacgtatttgatgcagtgtcggtgattacctcagcatttatttcttttgcagacataattgattatttgttatagcgatgaagagtaaaatattaataattataatgaataataataaattgaaagaaaaatgtcgtatgagataataaaagtagattatcaggtttatttatacactgaaaatttgataataaaaatagaaaataaactttacatcattaaaccatctggacagatttaaaataaaaaaatagcacaataataataccaacataaagagaaagtgcattaactaaagataagaaagccacagtataaaatgttaaacacttatacccactttatcgtgatagttgcatgcaactttaaattatgctttgtaagaaagataatgggtcgtccctttgggagatatgtttcattttcttggtatagccgcccagtatttgtcactttacaagtacatagttgctatctactactacctactacagtagttatctcttcatatcttgctatctttcgctatctcacatgctgtggagagttactctaaggagtaagtgtggaaacttaggatgggatacctcggacatggcggttatcacggggacaccgagaatgtcagaaatttgcaccatttagaagatttattttaaaattgtggtactccatagagctaagggatatggctagaagataatcttcaagaaagaatagatgatttggtagctttccaataaagatgacaactttagtattcatttcagtttagtaagtgaaataaccgttatctgtctaaaaaatttagacacattgataagaataaaaaagttctctaagactgatgataacaatttggatcagccatgtatccacagtttttgaaaagatttgtgaaactaccattattaggaaataaattaatattatttttttattactatcattaaattttaaactctataaaatattgaaaatatactataagctatattagctaacgagatacgatgaatccattcaaaccgattttatcattaaaattaatatcccaagttgaagaacctaaaatattagcagaaccctctattctaacgatacaagcatctttttctaaattattagcctttaaaccagtttctgtaactttagcatgaaaaattgatccaattaatgattcatttacaaaataatcatctttattatgtttaccctttaaatataataaaccagttctaccagcagttcctgaaccacatggtgatctatcaacttgtttaacacctaaaactaaacaagatttttgattaaccatttgagtatttgatttatcaggtttattccttatattaacaaaatcaactccatgtaatcctttaatttgtgggaaatctttattataaatttttaaattattcatatttttaataatttgtttaacttcaaatccaagattcattatatcacttgcattttcaggtttaatttgcaaaacattttcatcaatttctgtaaaataattgaaagcaccattgaaaacaatatcaccattaattcacctttactagtatttactttaatattttcataaagtatgaaaactggagtattttcaaaacttacaaattctacatttctaccattccaacatgccttggttaaaatttctcccactgttgtctctaatttaatttccattaattcaggttttaatttatattttgatttattaatccaacctttttcaattaaagttgttacaactgaaatcataccatgaccacattgatcagtataaccatcgggattgaaaaatataattgaagcatcagcatttaaatttttatcaattggatctaataaataaccaccaaacatatcataatgaccccttggttccctcataagtgaattcctaataaaatcataatttttttgtaaatagtttcttttttctaataatgttattccctggtatatttttaggtaacccattaatgacaattctaaatggttcaccacatgtatgtgtctccaatgtggtaactgagattgaattcattaatcttatgaagtgattaataattaagaagaagctatgtatagtaaaaagttttattctttggaaaaaagaactttaagttgattaagggtatttacgatatggaattatatccatttcggagagaccgagacaagggagtcgggtgtaccgtttgaggtagaaggtatattatatcgatataatgataataaagaaagagtaagagaggaagtgataagtaatgatgagtgctgtggcatcaaggtattgtgttatgtatattgaaagtggtggtaaatggtgagctaccagacagtttgtaaaatggtagtgtcaagtgcagaagctatgagtagtggttttggaatttagtttagtattattcccttcacttactactaattacctacagatacactcttaccatgtacataagtctatctactttaaaactaagatatattaataataaatacagaactatataccatatagagaatacaccccataaaaaagaaacaagtaataaataaggaaataaagaaaatctcggaattttcaaattaatgcgaaatcgccctgtttttcaaaaattgtgcttttttgctcatcgcaattattactattatgctcagctcttctttatcttggggaaagtagctattggacaatgaatgtaccagatttagtcaactcgtgctctaattgcaagtccaagaaagttaaggtatgcaaggaactttattaatactcaaatttgtaatcaaatactaacattatactattatgcttatttttttcagtgtgatgggaaaataccttgttgtagtagatgtcaaaaatggaattcaacttgtgatataactaaaactgtaatgtataaatattcaactattcaaccattattatctaaaattgaatatttacaaaatcaaattaataataataataataacaataataatactaataataataataatgaaaatgatggtgaatatcatgaagttggttcattaacaatttctccaaatgatgaattacagggtaaatatgttggtgctgcaactggttcaaattttgcaaaattattattgaatcaagttcaattaccaaaacttgaaaatattgataatatttcttcaaataattttattgatatgaaatattttacaaatttgaatattaaatcatttgcaactataccaacttattcaattgggaagttcttaattaataactatattaatttgattcaaccctatttcccaattattaatattaaacatttattaattaactttgaaaaattatataaatgtccacaaaatttagattatcatgaaaaatatattttatttatggtatttgcaatttcaagtgaaagatgtgaaagttgtaattatttaaatacttatcataatcaattcaaaccaattgaatattataatacttctcaaaaatattttgataaaataaataatactagatcaattaatacaattcaagaattattaattttatttatttgggttcaatttactaatattttcaaagatgataatggtgattcgtggtatttaggtagatatattatgtcattagtaatggaatttaatttacataatgttctaactgactctttactatcaaatgaagagaaagaatttagaaataggttattttggacaacctatgtactagaaagaacaaatgcagttaagtgtggtagaggattatcattgagggaggatgatattaatgtaccattaccgatatttaatattaatggagaagattcaataattgataataataataataatacaagttcatatttagaaaaatttgaatatccaagttataatgaaattaaatttaatgcattatttatttcaattagattaaataaaatctatactatattattagaaactgtttatatatcaagaacaaagggtcaaattccaaaattaagtatggaaagtataattcaatataaggaaaatttacaaaaaatgatttttgaaataattgaagatatgaataagaatatatcaattgaattaatgtattatcatgaattaataattaaggcttatattgcatcaattatgttaaataggccgtcgccgtcatttttaaatcctgataataaatccattttacaatgtaaggaagattgtgaaaaatcattagatagtttcctatttttaattaatacagaatataaattaataccatcatatttacatgatttagttaatattggattaacaatgaattattgttgtatgaaaattgattcaaatagtgataatttaaagaaattttcaaataaattaattgaaataatgaataaaattattaataattatccaaattttattaaatttaaaaatctttatataataatatcatcaataattattgaaagttttactaataataataatgaaattaatgagatacctaaaccattagtacaaattaaggaacaattaaataatataaggcaagataagcaaaagaagatatatatgagagatccatttaagactaaagatggtagaataagtaaggcaacaatagttaatgatgttcaatcaccaagaggtggattaagtactgcacaatatgataatttatttcaatatcctattaatgaacagacaaggtataatgagattgatcctgtaacacaagaattatttcaagatgtatttaagagatattatcaaggtaatgatagtgtacaggaggatattagtgaattatttgaatttcaaaaattcaattggaattaataaaagagagattgtatcattaattatataaagctaaataaaataaataagtaggtaaaggacgtttaatatttatgttgggttgtggggtatttaatgttaatgtaaatgatttgataaattatcatgagacatacttctattcaatatatttttcattgaatcatctgtattatattattgctattattattgttattgttaataatatttttattattaataaattgtaaagttggaattataggtaatgaagtaaatgaatttaatgagtttaaagaatttaaagaatttaaatttgataatgaattaattgaatcatctttattaatcatataccttattggaggtaaaaaagttttagaagaagaattaattgaattatttgataaaagtggtaataaatttggagattgtagaggcgttatattattagatgaattaaataaaggatttgtactataatgtaaatttggggaatttggtcttgattggaattttttagaagaatttgatttaattttatcaaaatccaaatgacttgaagatgataggttaattgaagatgatgatttattaagtaaattattcatatgaggtaatgaagttaatcttgaaattgatattgaaggtataaaagatttattataggaagttgataaagttgaatttgagaatgaatttaaattattatgagatgaatttagagatgtaagagaattcgaactattagttcttgaatgattaaaagtatttgaatttgtatttgattgtaaaattgattgaggtactggtaatatttgagtatttgaaggtattgaaattaaaggaggatgattaattttagctttaatttcaatttccacttcattttctgtctctgaagaagaggatgaggaagaatgtgaatgggacatattattattattattattattattattattattattatcattaagtaaatttgataaacataatttattagcagattgaatttccttttctttagctaattctaattcttttctcctttctttccatttgcatttgtaatttagtctttcttggttttcttggttttctaggttttggattagtatgaattcttaaatgtcttgttaattcatcagatcttgaaaattttttagtacaattattaaaagtacaatgatgaggtttttcaccagtatgagttctaatatgtcttgtttgatgttctaatctatggaaagcttttgaacaaaaagtacatttatagggtctatcatcagtatttgacatggttactgaaaggaaggagaataaagaagaagtaaaatataataattaataattaattaaaaaacaggaaaatacccggattattagtgaggaaatatacgaaaccccacattggtgaaaattattgtgttacaaattttaaatttgcgttgcttttgaagtaggtaatttccctctattattttattgttctgggggggtggaaggggaaagtgagtgtgggtcacggaaaatttttatttttttattttttattagcagattttttattttttcttttttttctttttctttattgcattagaagggtttttccggactattgtgtgcggcttgttttccgtttttagtattagtatggtatattatattgtttttccgtttagtaacgttatttttttattttttcattacggtatagtttttccgataattataagtataagtatccacacttttaaaattatttagtatctaagctttaacataccccgcggaattattttcctattatagactaatattattttattacgtaagaagacagttacgtaatactcttcactcttccccaggtaatattatattaataataataataagtaggataataaataggttcttctcatctgttggaaagtaatctgtattttatatatatatatttatatgcatacaattagtatacattatactaatacactgacataaactttaacgttaacgttttactagttcatttagttctataagtaactcccattttaattatattttactatgtgtttacaatatcaataatgtagtatattctcgtatcactatcactatcactatcactatcactatcgtattctatacaatacccccacaatacccccacataagctgatgaacattaataattatcaacagaataataatattcaacaaaatgagaatctcggcataacattgaaatcataataccccgaactcttatccttattatcccgaaatttttttgttctgtatttacatttacaattatttaaatacatttaaataactcaatgtcttccctaaatatttaccataatttcattattaaacttcccttcttttaacaatgtcagattttattgctcaaaattttaatttaattaaattaaatttattaccagattttaatactttcggtttaccagattttaataaacctttacctcaatggccttttaattttaataatcatttattaaaagatataatttatccaatttcacttaatggttatattgctttatcaatttcaattacttattttatttctgttaaaattataaatcaaattatacttaatagacaattgaaatattttaaagaaaataatgatgaaaaattaaaattaccttcaaatttaaataaattaaaacctgtaccttataaaattacaaattataaaattttcaaaattttcgttattattcataatattttcctttgtatttattcaatttggacatttattggtatgacttcaacaattcataaaatttctcatattttagttccaaaattattcaaaaatttaaaatcttatgataattttacaggttttgaattattttggcaaggtatttgtaataataattatttagaaaaaaatttatggattaattataatgatttaaatttaaaaggtttaaccttttatagttatttattttatttatcaaaatattatgaaattttagatacaattattatcttattaaagggtaaaccttcatcattattacaaagttatcatcattcaggtgcaattttatgtatgtggtcaggtacaagatttatgtcatcaccaatttggattttcgttgtctttaattcatttattcattctttaatgtatggttattttactttatcatgttttaaaattaaagtaccaaaatggtttaaacaatcattaacaactttacaaattttacaatttataattggtggttcattagctgtaattcatttatttattcaatattatgatcatattaataataaatttaatagttgtatttcaacaagttcagaagctgcagctgtttatattaatgttttctatttaactcctttaacattattatttgctgctttctatattgattcttatcaaaagaagaagaacattattaaaaagaataatgaataactctaataaaaaactctctttataatattattaaccccatgtaattattatttatacactaactccggctatgcttttcggaattaaaaaaattaggaaattaaaaataaataatttcaaattttcattattatattatagtgagaccagcagtctgttaacatctacaggaccaatagcaggtgttttatttcaatatctaatactatatctttaaataatggtactatattataagaataaacatacatataatcataattttgaaactgttacactagcttattttaatcgatatccaaatccttattcaactcatgttaaatcaactgatacaattgaaatttttattgataaaaatggtaatttacatcaattaaaattaattaaaaaatctggtagattaccacaatttattaaacctttcttaggtaaaataacaacttcatggataattgagaaaacaattgttaatccaattacgaaagaattaattacatttaattgtaatattgatcataaaaaaataattaaagttgaagaaattaatttttataaatttaattttaatcaaaataaaacaaattcattcgttttcgttaaatttagtagtggatttacaaataatttctcatttggtttaaatataaaggataaaattgaaaattggtcaaaaaataaatttagtgataatttagctaaaagtaggaaaggtttacaaattgtaatggattcagttaatgaattattattaaaatcaaagacatagacatagatagcttaagcaaaacttaaattccaacctaatttcttaattattaaagtaccaattaataaatttatcaccattaaaatttaatttccaaacataatttataattaattgacaaattaaaacatttttccatttatacctatttataaataattgaattttattattaatttcaattctatcattaaaattaatacaatttaaacctgcaataaaaattggtaaacataaacatgattcaaattctgatcctaataaaatatctaataatttaattaatttattatttaaatattgaatttcaatacttgatgaattaatttttaaaattaatgttttaagataaatttttaatgtaatttggaaacattcaaaaattgttaattgtaattctaattctttttcatttaaatttaaatcaattggtaatcttggtttaacattattaatcataatttcaattttttgacattcattgaaaatttcataataattcataattttatcattattattattattattatcatcatcatcatctatatcattcatctatattaatattttcaattaaattattaatttgtgctaatatttggaaaactggtgatgaaattccatgtaatggatcaataaatttaattttatttgaaactaaccacattttttcataatctttaatatcaaaataactaatatttttattaataccaattatatcatgatatgcaaaatttgtaattaaaaaatgttcaactttactattattaaatttatctaatccacctcttaaattaattaattcataacttaattttaaatattttgaccaattataaacatcacctttacaaatttcaacaccacataatattaaaaatgctgcaagtcttgtattaattaaattttcataatttaatgaataagtaaaatcatctttatcaattatactactattgttattattatcattgttattactattattttcataaattttccttactatcatcattatcatcacctatttcatcaaattcacttatttcttcaattaatattggattatttttaaatcttttaaatgattgattaatataatatttcccccattttaaccattctttaccacctaaatgaaatgcactccatgcaagtatactataaagaacacttttatcaacatgtgccattggtaagaaagtatttaaatacatattttcatttttaggtgcagaacaaacaataaaacttaatttatccctataataattatataaaaatttatcaattggtgataaatttgcctaatgttgtattttgtaaaattgatggatttgctataattgtaagttcattattattattattattataatattattattattattattattataactaatttcattttcaaattcattacgtttacgtttcctatttcttgatttactattattttcaataattgacatttcatgagttaatttattaatttcatcatttgtcatattttcattaatatattcacatcttctaccaagtcttgaacaagtcaccacaaattggtttgatttcatcacatttcttcttccgtaatttacaagtaatacatccatttgatttacgtttattcattgattaataaaatttgtataataaattaaattaaattaaattaataaactaagttaaatctataatttatggggtgagtgttattaaaaaattaaatttttgaatattggcttatgtaatcaagttgttgaatattggatatattgaatattggacatgtttaatagctgtaaatggtagtggaatagtaatgtaatggtatggatatttaattggtggattaaatgatgatattagaagttattattgatataattgattgaataattgattaaataatgaattaggctatggtggctcatttttagaaaactatgaaaaatcaacttaattataatcaattaaaaccatttgaaaagcatttatatctctgaatatttaataccataatagaaactgtttagatgtccatattacagtaatactgctcaatacgatgcaattgcaagaagaaagaagtgtgttaagggaatgagccaggacgcgagtaagtattatagtagattatatagaatttagttcgttaataatatattatacatggtaggaattagacattataccttagataatggaattataatacaatatcaaagattttgaaacaaattcccaagatactggatcaaagaatatataagtaccttcctctgcatttgcattaattggagttggatcaatatttgaatcttttgttaaccaaacttgtaattctttatgatatctccaatttcttttatttaattccctagcagataattcttgtgataaatctcttggttttgtataaaatataaataataatgttaaatcatcaaattgttgaaatctttcctcaattattggtaattcattattatttatacggaaagattttggagtttgaaaaattggttcaacttctgatctagcagtttctaaccatggtgatgataattttgttgaaagtttttcattggtggtattgatttcaaatccttgtaaatttaaatcaacacctaatgcatttgaatcattaaatatattatttaaaccttttaatccaaatttatccattggatctgattctttaattggttcaaaatgcattacaggtgcattaagacgtagtatattttgttgttggatctgttcaggtgtcatttctgttggtttagtcattgtttgatgattattgaaggaaaaagtggtggtatatagtcaaagattatagtacattacataatgcaaattttttcaattctacaaccatatttatacaatctttttactaataacaaggatgaaactacctaatataataataacaggtactccaggtagtggtaaaacatcacatgcagaggaatttgtaagtagacatccagaatttaaacatattaatgtatcagaatatgcaaaattaaatggatgtattgaaggatatgataaagatagagattcatcaattgttgatgaagataaattattagatttattagaaccattagctaataaaggtggattagttattgattggcattgttgtgaaatattcccagagagatggattgatttagttgttgttataagatgtgataatagtattttatatgatagattagttaatagaggttatagtgaaaataaaattagtgaaaatattgaatgtgaaattatgtgtgttttattatttgaagcacaagaaaattataataaacaaatagttgttgaattacatagtgaagatttaaatatgttagataataatattgatagattagatcaatggttaaataattggttagataataataattaaataatttatatacatgatagttttatttaccaattttaatacgtaaagctctttgagcttttcttctctttcttaatttatgctttttcattttaagtcttctctttcttaaaactgatgtcataatcatttcagttattaaatttgttgatgatggcattgtaataggtaatgtagggattgaaattggttcaactctattgatcatagtcatcatagatgcagatctagtagatactattctactgatagtatttatacctttaaatacgttaaatacacgcaacattggttaataaaaggagttatatagaagtagtagttaactaattctaagactttccacatagtaaaaaatcatgtcgagaaaattaattttaatttttcactttctatttctatttcaatttctatttctatttctatttctatttatgatgatattcttatgattataattatgaatacttattagaaatactggttaattacttacaatagttgttatagagttatagaattatagggttatacaaaattttatacttatttttattcttaatcttatcatttaatcctttgacttcttcttcttctttttatctttcttttcttcaccttcatcttctgcctttctcttcttttcctttttatccttcttctctttcttttctttcttttcctttttatctttcttttccttcttttcactcttttcctttttgtctttcttttcttccttatttgatgattcaattaaatcacttgcaccaccatttaattttaatgcttccttaattgcatcagaatttttcattggtgatttacctgtattataaaattctaatctatcttcaacttgttgttttaatactttaccgaaaatattatttgcatcatcactaaaattatcaattcttgaagcaattgaacatttatttgctaaatatcttgaaattctacctttattttttggacttgctttaccaataaatgatgaatgataaattaaaccatattttggtgtattaccctttgtctttaaagctctaaataatgctttttcagcacctaaaatttgaacagttgaagcagcttgcttggataaatttgttaaagaacctgcatgagaaattaatcttgcaccaacaacttcaccaattaattctgataaatttggtgcaactaaatgcattttatcatttaaataattaaataaattaattctataatttgaaattgaatcagttctctttgcaaatgttaaaatattttccatatcatcatttgaaatatcttgacccattgaaatttttgccatatcaataattttttgagctaaatttgaatcatcattaactaatgatgcaatttcatgtaaattatcatcacttaaattagatttatccttaatatttaaaactaattttgcatatgtatgattatcattaacaattttagctaattcagggaaatgccaaccataccattctttaactctcattgaataagtattaatatctttatctaattgatctaaaagtgcaattgattgtataatatgattatcatttttttgaactgaaaatttaacttttgatcttgaataagcatgacctaaacctaattgagctctctctaaatcaccttcattaaggtttttcaataatttttcaccatgaaatctaatacctcttaataaatcttgaacaatttcatttgagatacaatcaatataagggaaaaattctttaattgaaggacctaattgtttatcagatatacctaaattaatttgatcttttgattttgactttggaatatttaattcaataattgatttaagataatcagatactaaaccttcactaatatcattagcattttctaaagcttgagctgcacctttaaatggagcaaaagattgtaattcaactaattttgaaaaatttgataaatcattaatagattcttgaacatcctttaatcttgaaccgatattatcattttgtaatttaactttaaaaatagcataaccagtaggttgttcaaatagaaggaaatctacacctgccattgttacttgattaaagttatttgaataaaaaggataaaatttacttgtaaaacttataaaaaattaaaaaaattaaaaaattttccaaaatgaaaaaaatgctagtatagtatgctcttaattgaaatctcactaagtggaaagaaagaaaaaaaaattttcttttctttgagaaatttaaaataataaaatttataatagtcgcgtctattttaaattctattctgatcacgtgacggttacgtaataatagacgcgtcgactcatcgactatttataaatataataaatcattactagtaataacacttccagtatctaaatcatcaactttaataccgtatttattacattccactgtcattgatgcttgtaaactcttctctgcaagtatagtaacctttttaggtattatgttctcaataatcttttcacttaattcattgtaaatataataattattgaaaattggtattatagtcattacctttatactaccatctcttatttgatatattggtaaatctcttatatctcttttaccatacatacttacaatcttactactattcttattaacataaacttgttcatattcatcatattcctcttcttcactatcatctccttcaccataacttatatttacattaccaatcttctttttatccctatattctttcttaccaattaatttaccctttaattgttcactaacaataattaattcacttccctttatatcattatcagtagtaatactaatactaatttcttcaatatctttactatacatttcatatgttatattagaataatcatcttgaataatatatcctggtattctactctctttattctgtattatctgttagtattgatattccaagtatttatactctatatatacataccattgcctgttttgtttaataaagaaaacgaatggtagtatatggtataaattttcctcacatagtaaaattaattttccactattcacctgttttttcatcaaattatcatacaatcatacaatcatacaatcataccccccatatggagaatataaataatttacaaactaaattacaaacacttattaaatcaagaactcaacttgaaactcaatatcaagaaaataaaattgttttagaagaatttgataatttaaatgaaaattcaaatatttttaaattaattggtccagttttacttaaacaagattatatagaagcaaaggataatgttaataaaagattagattttattaataatgaaattgaaaatattgaaaaaaatattaaacaaactcaaaatgaattatcaactgcttctgcttcactttcatcatcctctgcttaattgacttttcaataaattaacaatactaactgcattaaagaaaatccattcttcaattgaattataaatatatcctgcagtttcaatttctttcaatttattatcaacaaatttaaatgtatcctcaaatcctttacttttatcattaatcataaataattcactttgtataattaatccacttacactaattctctttgaataccatgcaaaatcattacttttatctcctgaataatatgttaaatcatctgataattcgtgtaattccttcattgattcaattaatctatccttatttatcaatacatatcctaataatccaggtaattcattaataattttcttatttaatgataatctatatttaattaaacttcttaatctatcaatttctttactattattattattcataatttccctaaattcttcactttgagctaatttattcaattcatctctacatttctttaaatgaaataaacataattccatcttaacatctttactattacttgtaaaattaaatatacctccaccattaataccaaattctttacttgctaattcaacacttttcttattaaatccatattttggtacatattcttcatatgctttatttaaaatttgattttcaattttatttaaatcaataattgttggattaacatgatatatagaatgaaattgtctaatacctttaattcctctattaatcatacctttcatactcattttccttaccttaaagaaaaatcatctcattatagcaaatagaaatttctcagcatgaatttttcaaattctcttaataaccctttctttattcatgaattactttattgaacgattaccacgtttaaatacattaaatatctatgtttcaataaatataacaaatgttacattaaatgataattctatattaataaataattcaataattatacctataaatgtatcaaaatcaaataatttcgatattttaccatcatctaatggtttcacatgtataagaatcaaaattaataccattccaatcacacatgatgataatatatatgataaatataaatggaataataaacaattaaataaaattctcaatgaatcaacaaataattcatcatttaattgtatttcatgtaattctaaattaattaattttaataaaattaaaaaatttttaccaatgccatctgaattatggtatgaaatgttagattattggcattgtcataaacctaatgaagaagataaatcatctaataattctaaaattttgaaaaaatttaattccttaaagccaataactaatggaattattattggaacttattattttataataaatccatcagattgggggttgataattaagggaattgatgaaaataaagatattcattgttcaaattgtgatcagttattaggttcattagatgaaaattcaggtagttataaattacttaaatggaatttaaaatgtaatgatgaaatatttacaaaatcttcatttgttacaattagattattagaagaaattaattatagtgcagtacgtcaatttatattatcttataatgatattaaaataaaagtttggtgttttggtgtggggattgatatttcaattaataatcaaaattataatgattgtttgaaaatattgtttatggagtataatgaaattgttgatggttcaataccaatacttgaaattacatatgaggaatcattaattgaatttattaattcattgaaagagattaattcacaattaccattacctttgaaaaattttaaaaactggtatgttagttatgtaaagttagaatagtatatacacaatataaaaaaaagttacaaaatagaataaaataaaaatcctaaaaaatgcatcttttttaattctttgaaatagttggtaaattaatattttcaatatcgtcctctcttgataatgatttctctaatgatataacatcttcaggagctaaattactctttggtccatggaatgatttatatttataagtaaagaaataaatcattgctaaaatccaaactccaaaacttaaaacaactgtataattcatatcagttttatcaacaacttttgatgctgggaacatacaaagtaacataatgaaagccccccataaacatgaaattatattattaattttagataatttttcacctaaataaaatgaacctggtttaaatttatccttaccatacattaatttaaggaaaattggtgtacaccatgcaagataacaaccacaaacataaagtgtaaataaagcatttgcagctgcactacctgctaaacataaacatcctaataataaaccaattatacaacttaaaccaactgctctcattggaacttttaattttttattaacaactttaacaattgaacaaaatggtaaaccatcatctcttgcaaatgcccaaatttgtcttgaacatgcagtaattaatgatgatcccattaaccattgacaagctgccattaatgacattaatgcaactgcccattttttacctaatgaatcataaaataattgagcaattgggaaacctgaacctgtatctaaaactctttgaatatcttgactaatacatgcattaataacaattataataatccaacctaataaaccacaaactgaaattgaaccaataataccaattggaactccataagttgcatttttagcttcttctgacatatgaacacatgaatcaaatgcaccaatagtccaaactgctgtcatcattgataaacaaaattgccaaccttttgtccaatctgaataatcttgaactttactgaaaataaatgcaccatcattaaatccacctaaattaacttttgtaccaattggaacaacaattaaaaataaaattaataaacctgtatgactaattgatgaaattgtttgtaataatgcaacatttttagatgaaacacatgttgcaataccttgaaatataatacaagctgcgaaaacaccataagttttacctgttgtaatatcaaaattaccatcttttgaaatataaacagcagctaaaatttcctcagcattaccataagcaacagagactgcacctgcacttaatgccattgtattagttaaaccaattaagaaagataatggaactctataactttcaggagcataataaaaagtccaataatataaaccaccagaagttggaattgcactagctaattcagacattgaaataccaattgataaaatgaaaactgatgcaattaaccaagaccaaagaaaaccagcaggacctgaagctaaacctgttgcagcaattgatgcaactgatggtaaaatacccataattgaataagaaataccgaaaatttgaaatgttgaaaatcttctctgtaattcttgtttataaccaatttcagctaataaagtttcatcattttgagctaattttggatcaatttctgcaatatgtgattgatgagtattaatctcatgcatacgagatgttaaaggtgataaaaccgaacgtgttggacgaagtgacattgtttggttatatatgatagttgtctgtgtattaagatgaaattatgttcttattaaaatagataacgaaaaagatgataaagatgatgaatatttatatagtagttattaatttatcatatagtgtatgattcattaatctatataaataatcaatacaacatcttatctacagaacattatcatgaaaaggtagaaaatggtgatgtaaagtgaaaaatttcttaaatttcttatcggtaaaaactttatccactcttctcgcccaatggggaaacttgatgcactgataagctcttaattattattaggcatctataactgatacaattagcggtgctacctgtttacgagatgcacttgttttccactgtttccaccatttaccaccatttgcattaattctattgtcttcacttaattgtaactcttctcttaccgatttgataacgtttccacttaatttaccacttgcgttaatatatctgttaaattcaccttctttatctgtaaatgatgacataaccactaataaatcaatctttctatcctttatccattggtttaattcttcttcaattttatcgttaccgtatctttcgattaatatattgggggaatctgtacaactggaaataccaatcttgtatttatattctccattaccgatattatcccattctttataatctttacctaatatatcacgtaatgaaaatccaactgtactgttcttctcctctgaaagtttcttaaataattcttttgtagtggtggtgtttgtattggtactaatatcaccgcttaatattgtaaatgatgatttatcaatgttttcaactcttctctctaaatttgatgtatctaataataatggtgcagctaataattctatctctgatttagataaaattggcaaacactgtttcatttcaaccttcatataatcccataccaaacttgaacatgatccagatgtttgtataattcttggattagcatctttaaatttccctaaatcaacgtgatgatcaattattcctacaactttataattttcattagttttccaaaattcattatcaggattattatgatcaactaatgttaacacatattctttgttttcattatttaaatcattaatgaaaactaattcattttcaggttttaaaccagtttgatttaaagcatattgaatatctctacgtaattttaattcactctgtgggaaactaattattggataaattattttaccagttttaataaaatttaaatatgaatatcccagtgtacaaactacagaatccatatcaccacttgaattacccataacaatattaattatacttaatgcattcctctcatttaagaatgacttatgtgcatatcgtagatactctactaatcctatcattgtttacagtagataagatactctattacttctttaaagaaccatcataatggaattcgaatcatgttcatcctgaagtgaaaattttattctacaaatccactctcttacactctttaagggttattctacgttttttacacactaaaagtaagcaccactactaactccactaatcacatactaccacatccaatccaacactgtactctcccaccacccctacccaacctccaataacatcttcccaaccctatatgtagtaacactcttaacacaaccccaaataggcaactaaggcggccaccggtaccggaattctcaccactgagtctggcggtctctgatttcatgacatgaaaaatggatgattcatcaatcatattaaggtctggagagttgtttcttaagataactactctattgagacaatcgtaaactataatgactgttaatattgctgttattggtgctggtgttgttggttcctcctttgttaaccaactttctgctgttaaaggtatatctgctaatcttgtctatattgcaacttctaaaaaggcaattatcagttcagattattcatcaattaataaaccattagaatctttaccaaatgctgataaacaacctttatcaactgatgatttaattaaatttcttaaaggttcatcaaatccagcaattttagtcgataatacttcaaatcaatcaattgcagattcttatccattatttgcaaagaatgaaatttcaattgcaactccaaataagaaaggtttctcctcatctcttgaattatggaatgatatcttctctcataaaggtttagtctatcatgaagcttcagttggtgcaggtttaccacttatttccccacttaaggaaatgattcaaactggtgatgaagttatctcaattcaaggtatcttctcaggtactttatcatatattttcaatgaattctcaactgttgctccaaataatgaaaaatttagtaaagttgttaaaattgcaaaagatttaggttatactgaacctgatccaagagatgatttaaatggtttagatgttgctcgtaaagttacaattttagctagaattgcaggtttaaaaattcaaaatccaacttctttcccaatttattcattaattccaaaacaattagaatctgttcaatcagctgatgaattcatgtcaaaattacctgattatgatattgaaatggataaattaaaggaagaagctgcatcaaatggtaaagttttaagatttgttggttcaattaatgttcctgaaaataaagtttcagttgaaatcgctcaattcgataaagatcatccttttgcttcattaaagggttccgataatgttgttgctattacaactaagagatatccaaatcctttaattattcaaggtgctggtgcaggtgctgaagttactgcaatgggtgtcttaggtgatgttattaaaattgctcaaagagttgataattaatttctttagaaaatgtttacttttataaatacacaaattaatctaaataagttcttcattattctcatatgcttcaactccttcacgaaatatctcccttagtttcttttcatttccacaaatttcacggaattctaacataacactctgtgaatcaaaataaattgccttacgtttaccaagattatgtaatttaccaatatttaaattaagtcttgaaatatgtgcattatttggtgctaaaaagaaatctccattatttcttaattcagctatataaccaccagttgaatgaataaattgtgcatatttaaacattggtttaccccaactataactaacatcaaattcatcatttttaaaataatttgcagttctattatcaagcataaatgatcccctttttaaaagatacaaatggaaataatatttctcaaattcaaatattttactatatttggaaaattcatcatcaatccatggatttaatgctaaatcaatttcaattgttgaatgtaatggattagttataggtaatgtaaataattcatcccatggaatttcaactaatgataatccatatctttcacaatatttactccatccatttattaaatcttcaattaatttactagtggtatttaaccattcgattctaatatggaaacaatgttcaggattatgaacaatatcataatgaactttaactaattcaggttgccatgaatatccattaggatctaaatcacataaaacttctttacttaaagtaattgtctctcccttaccggtttgtgagtctgcgctattgattttattaaattccttaacttcaccaatatcatctttaatatctaattcttgacttgtaattgtaccacttccagagacaccacttttaagtgatttctgtgattgaatggaatttctatgactatgatattgagcttcataattagcaaaatttgttgcctcctcggttaatttcttattaaaatagtagaaataatgaccatctaaaaatttatgtgttgcaactgcatgatagaaaacattttgttccatcaatgaattaccaaattcaactgcttcctctcttgtatctatatcttcaaaattttctgttaaaaagctaactaaatccataccaaggaaaacatattgatattttttcaaatgccagtatctatcaataactggaataccttcttcactctgtaaaatattaacaagttttaaaatattgatgctcttattatacttatggaattgtgatctgataattggagagttcaatgttgagattattattaccactattacttgatgaggcagttttaacattggctaaagatggtagaccaggtgtacccatttgccttattctttctcatttcattggattcatgtcttaaatattggaataaactaccagtgtaaaagtaaatctctggagaaacttccagctttttcttaattttcttttcctcattagtacggaatcttatcttataaatattcataatcagtgatctaataccttctaatctaatttcctccgttgttaagttttcattggtaattgaataaacattttcaggtatctcacttggtaaaatgacaaatttcattctgtggtataatttcttatctatagactcatcatagccagctaaaacttgatccaattgattccaattataatttttagtattgtattcatttttttgagatatcaaaacaggtaaatactcttcagaatatcttgtacgtatattctccaaatattgtttgtctgtggtggagattgcctcttttttcatcatcatttgctattttcttataaacttgaacattaattaaaccattgaattcacaacaaattctatgaatctcgttacttaaactcaaataaactctcttcccatttatgttagcagaattatctaatgattgtatcagtaatttaacatcaccattcggctttctgtgtttttcaactttttgtactttctcacccacacatatttggaaccctagagttaatctcaatgaaatcatacttttcatcaatgctgtatttgtttggttttcattcaataaattttgatttagtataacgtcataaattctaaatgtatagttttgattgaaatcactgagtgatggaaatatagttgtcattgtaggtaatgatgctggtgaacataaagatgtccatttgactgacttcttacgaacatttggtgggaacacaaacttccatttaccgtatgaaataatattcagagaatcaacattcaaaatatttgaaggattagttatatcaatccaatatgtattagaattagtttctccatcctttgtattcttctcttcgcttttcttcttatctcttgacactgagtttcgtcttaattcattacctgaaaattgaagtgaaaaattatttttacctttatttaagattacatttctgttactctcgtgtaaatctatgttcagtgaatttgatgattttctagaactcattctttctgtactttttctggaaatatcttcatcaaagctatcggtttcattcaagctaatcgaatcaacatcatcacctctaattctggaagaatttgatgctgtctttgatgatacggaggatgttaggtcggccgttctgggttttaacattggagagctaatcatttttttaacaaaattaatagctgatgcagaactagattcagtattggcatttttagataatgataataatgttgaaaatgcagaaacattaggtttggaagttgtacttacaccaaacacagtactagttgctggtgatgatgttttatttgaaccaatcagatcagctggcttaagaccttcatcggaattattttcaggtgtaacactttttcgtgagctcaaagaagacacgtttgaaatcagtttttgtttgtgttttgggattattttcttttggtcaactattggatccattagcttagctgaatcaaaaacgttatcatcgtaattctgcattgcttcaatcattgaaccatgattagaaagatcaagttcacctaagttcaaattagataactcattttccattacccccatcatttgcaattcatgaattctgcattttggtaaccattgatggactgcttgactgctatctgtccaaaaggagatgtccaaccagtgaggaatacaatgttttagtctattttgattatcaaggaatcttactaagggaacgacatgcaatggttgttgactcaaacatattatatcaactgtggaatcaactgtggtcattatcttacttgttttgatcaacatatcatatgaaacatcaaataaacctgtacctggcgtaatcattataaaatggtttgttgtttgtcttaaatatgagtctttgaaatcatcagaaactaaactcatacccaaattaatagcttcaagaaaagaacctttcacagatggtaagatagtaccttgaataatatactcctgtggatgttctgcatctctatgctggtttttatgtaaataaacatctcttttaaaattagcaaactccaatctcagtgtagccataatttcgttccataataatatatgaacttgatcaacaacaactctgtaataatcggatttatttcctggtgtctccccttctgaatactttatattttcaccatctaaatcaacactagtaaataatataattgtaatcaaatgatgagttcccatatccctccatttttgaaaaacttttggaaaaaatgaattgactaaattatggaacatttgttgaccactctcttcaaaatgccacatttcagaagatatctgtataaagacaattaatctagctgagtctgatcggaaaacaactttagtgtccttacttatgtatgatgaatagtatttatggccatttttatatattttattgatactcagtctaattgatccattaagataagatattttttgatttttgtaaacacattgatctgctatcaagttggatatatgccacatatctcctctagacaaatgtatatctttgacataaatttcaattgtatctgcttgaactgcttctcttgtcctcactttaacagcaacttgatccctcggctttaaatttaaagtggaaacaatagatcctgataagattgatataaaaccacttggagcactgtttgattcatgcaatatagtttcaagagttggattcatagcagttgtttgtcttacattattatcattttgttcagttctggaatcattgaatgtattttgtgaattatccgtcggcgttgcaacttttgaatcaagatcatggaaaacaaaaaagaacttcttcttggaaccactaagacattgaatttcacctaaatcaccagctttagcacctgggacactttttggatcaactaaaactgagtcacttgatgttctagcttcggtgaaatttaacagttaaattgacggaattgtaaattgatggtgaaacagaattttctgtaatagcagtagttggtaatgtacttcttctactcgtctgtattgatgtattaggatctgattttctagaactcgatactttggaagtacttgtattggctacattgatactcagctgtggtttgttattacgagcgttatcttctggatctttgtttcttccaacaattaaggtggcttcattagttctttgactcaatctcgatcgtgagttggaaaaatctatattcaatcgtttctgtctctgcgatgacatgtaattatggttgtcaatggggcacctatttgtggaatcagaacgtttgtggagtaaggttatatgcattgtagtctgaaaattgtgtgtataattttctcgcagtataaaatttaattttactgaatcagtacattctaagtattatcgtgatgaattacatctaatcatgttaaatacattattatatacataaaatacacagatggcactataattagtatgagacatatctactgttatttatcttacctctaagaatggtagataaagactttttagaatttaaatttgtaaccatggatgtaattcttgatactggttgtttcttgatatcagaaatagataagataggagatgaatttccacctgaaccttccaataatccttttttagtttcttcctggtccttaagagtttcaaagcctttaacaatatctgaaattgtttctagcatggctgtaaagatgtttttgtaatgaagaaataactgaattgattgttctttcatctctaacaactgcttctggataaatttgactcttgagtaacagaatttcagattgaacagttctatcgatatcttgtaatctcttaatatttgctcttagtttacgacgtgtttgaacattttcatatggtaatggtctatcgctattcagattcattttcttttggttgatattatcatttgaaattttatccaatgcttccttgtaagttgaaatatttttaaaacttttgataatagtttttcttaattcatctgcattagcatataactctttataatgagcagttatatcatcatatgcatttacattcttttctgctccttgtaaaactgttggaatttcaaagagtctccagaaattgctataagaagaggaatttttgagagtgtggaataataaggtatcattagaatgatcctgcaaaaaatacatttagtgaatcaatatttttgtgaataatagagaagttgatacaaacatcatagattaattttttcatttgctttcccattgaaggtaatttttcaaactctgcaggatattcagttttaccacgagcgtgaactaatggaactggtaatggaagataatgttgactaaaataaacttcatcatctaaagatgttgttttttctgttctcatatgatcgatttcagtaccaattgaagtataatctgggctacttgatacattgaagttttccagatgttgcagcaaaatctgttgatttagaatctaatgatgtagaaacattttcaagttgatattcagtagatttttcagtattagaagattcaaatgtagtgattgttgatgatttgaatgtacaaattatcggtgtctgtattagattggaatacctcgtttttaaaatcaacagtctcttgagagtatggaattacctcaacagtttcatttattataggtttaggttcaggtgtcacatcatccttcggctgatacttcaaactctaattcttgatccattatttctctaggtgagtcggcatattcttcatgattttcagaacctgaaacatcatccttcttcttctttatcaacaacatcatctgcaaacattgatgaaagtgcagcagatttgttcactggtttgaccttgtcaactggtttatcttcttttgaatcagcaatcttttcttcaatggaaacagatttttcaataacatctccaatctcttctaccttagattcagtccttttgttcatctgtgcttattgggctaacaacttgaaactgattcagctgaagagtcagcagatttcatttcagtatctatgtttttctctacacttgtattttctggtgctagtttttcatcattttaatgactcagttgttgatttatcaatattcgcagcatacgcatctaacttttcttcaattgaaataacgttttcagtatctttagttatttcagatgaattggaatcaactggtttagtttcagattcattttcagatgcttcaacatcatccttctcaattatttctaaagatttttcagaatctatagatgaagctttttcgagatcttcagaagttgcttccagctatttcactcttgataggttcattggatgtactttcaacttcaatttcatttgtagatgtttcaacattttcttttgccgtttcgtatatagcggattcaagaacctctttgtttatttcatcattagaagtatcacaaatttcattaatttcatcttcagatacttcctttgctttttctttgcttctttagtctcagtttcagtatttgattataatagctggttcagcttcttcttctggtttttcttctttgacttcatctgatccctcttcagctttttcttcggtcttttctgcttctttttcatcttcaaccttatcttcaaccttatctttacccttatcttcagccttatcttcaaccttatcttcaaccttatcttcaaccttatcttcaaccttatcttcaaccttatcttcaaccttatcttcaacctcatcctcaaccttatcttcaaccttatcttcagctgtttcctcggctttttcttcagctttttcttcagctttttcttcagctttttcttcagctttttcttctaggttctccacaacttcttcaacatcatttccaacatcaatagtttctgttacttctttggtatcttcactttgttgctttttggttctcaattctaataatgctgatcttttgagtgcacgttcctcttcttctttctttaattgtgcttcaatacacttttcttgttcaataaggttcaattgatcttcattagcttcctcaatttcttttagtgtagctttaataaattcacgatcttttaactcattttcttcatgttctttttcttcttttcttattctttcttgttcatcaatttctttttgaactcttagcttttcagcatctctaattgatttttcaagttttaatgcttcaattaatttttttctatcttcatcagcttctttgaaaactttatcattttcttccctaattttaaccaaatttgctaaattatcttcatgttgtttcttcttcattaactcagcattctcctctttttcctttaatttcttcaaataagcagtagtccaatcttctattattttattgatatctttatattcgctatcatatattttcgattgagcagcaagaaaatctttatatgctttttctgaaccttcaaaatcaagttgaactaatttactcttgatcaacattttaactgctttttctgcatcattcttatgttggaaatcaaattcatatttaaaatcatctaattgttcatctaatggtaagtctttgatagattttgctaattgtggtatttcatccttaattatcttaggttctgaagaaatgtttgattttattggttctggttctgggactgtttctgaagcagattcataatcagatgtatcagcatcatcatcttcctcactttcaaattcttcactttggtctaattcttcaataattttcttacttgaatcaaatttaggtgcatgtaattgaatgatttcatcatctgaggtttcatctgacgtttgatcggactcagattcttcttcttcggaatcaaattctcttaaggttgtgtttgcaacatctggtttttcttgttttggtgaatcattgaagcttaaaacaggcttggatccattgataaaattggttggtttgccaaacatatttgaggcttgtgtattcgaaaatgcagatggttttgaggaagttggagcatcacttggtgtagatttagtttcttccttcttaggttgagataaaccagcaaaagggcttgattctttcttatttaatgataaaccaccaaataagtttgaagagttattaccgaatggagaagcgccaaatggactggaacctgtagtttctgctttcttttcaccaattgagaaagagccgaatggacttgatttattttcagtggagccaaacataggttttgcttctacagttggtttattcaaacctccaaatgaacttgtcttgttttcagtagagccaaatatagatttcgtttcctcagtagatttattatttcccgctaaacttccaaatggacttggtttacttttagaagagccaaaaatggttgaagattttgtttcgtcagttggtttattatttccagctaaacttccaaatggacttgcaccaccagcactcatattaccaaatagtgaattatttgtattacccagtgagctaaaagcattaccttgagatgaaggttgtgcaaatttaccaaaacctgaagtttgattcaacattgagcttgcaccaaatggagtggatgttgatgtttgtgttgatggctttgattgattcattttgaaaccattcatactggagccaaatgatgaaccaccaaatgcagaattggatgtatttgttgttggttgaccaaacattgatccaccaaaaagattgtttggtttttgttcagtttgtggtgtggttgatggaaatgtaggtttaggtgtgttggatacaggtgttggggctgcagttgatacagatgatgaagcttgaggtttagtttgaccaaatggtgatgaaccatcaaatggattagatgtattattactttgaccaaatatagaacttgaagtttgaccaaatacattttttgatgttgtggtagatcgtgtttggacaatacttgaggcttgttttatttcagataaactaatttgtggagtattctttattaaaagatttttagcctttgataaatctgtctttttattaagaatatcattctttgaccaaacattccaagaaattaattgacctctattagttaagataataattcttggtaaaggatctgattcatcaacacctttacaaggttgtttaacattaacatttgaatttaaatccaatataagacctaatggagtatcatcatcacctgaatcatcatccattggcattgttgctctatctgaatcatttaataattctgttgtttgatttgggaagaaaagatctatatcaattgcctttgaaccaattgaaattaaaatttcaggatattcagttgaccattgatttaatagtaatgtataaaatgatgcaattcttggtattgcaccataaggagcatataaaacatcagttgatgaggaatctataagtgaaagattatttggatctaattgatagaaatatgttatatagttattagtttcatcagcattaatttcttcacctgcaattgccataatatatttatcatttatttgttttaagaaatagatgttataattttcctctaattcaatatcaaatgatgaaaatggtacaaagtaatctggtacatttgaaaactgtattttagaactatcactatctttcaatactatattatcattaaaccaagtagctgcagttgcgttagttcttaatctatttggagttggacatgtggtagtgatatccatgaaataaagagaaccatttgtgaaatgacataatgctaatgattcatcatttggatgaggtaatattctcaataatgaagatgaatcatcaaatgtatgaatcagttgatgattataagtaccatttactaaaatatttacatcaactgttgtaattgagactttacctgtattagaatcagttgatgataggtaaagtgaagattcattgaaatttaacttaatatgtgtaacatttaaatctattgggaaactatataaaacagtatcaatattatcattattttcgtttgattctaagaaatttgataatttatcaattgaaactaatttaagattatgatttaaataagcaaatataatacctcttgaataagaaatatctaaataattaactgaattttcagatagaaaagatttcaattgatcagaatctatatccgtgaataaatcaacatttggtcttgcttggaaacccaaatgctataatgaaaaaaaagtttagaaaagggatttatttatgttagtaatttgaacggttaggaaaatgaaaaaatagcttatatcatgaaaaatgtcaaaaaataaatacatacttctatttccacagtatcagtctgtttcattgagttgattagctgttaattgtatataaaataaagttatttaaagtgtttattgtgtcaattatttgagagatcaaaccaaaatcatgtaaaaacatgaagggtatttgttacacataggaaaaaaaaatatttattatttgtggtgtacaggtaaataattataaatctaaagacgcgtctgttacaccagccacttttaaaaacaaaaaatactgcacccgccacatgtcatgtgattggtcagaaagccttagtgcggctttcatagcggaaaatttattccgtttattgttatttttcattatcaagggtttttccgacaaaataataagatgattgttataattttaaggtacagagtcaatgattataatacatttttaatattttgtttgcttgtatttataaatgagatttgatatatttattatgatatattgaaaagggaagggaaaggggtaatgaaaatgaaaatggaattgaaaatgatatattaataaagaaaaattacataataatttgaggagtttcaacattatccttaatagatttatgtggtaaaactttaccaccattgatataaacttcatccttaactgtaacatcttcacctaaaactgtaacaccttctaatcttgcccatttaccaacagttgattcccaaccaacaattgttgatttaatcattgcatgatccttaatttcactatttcttaaaattgttgatctaacaattctaacaccatcaccaataacaacatttggtccaataacaacatttggaccaattgaacaacctttaccaatcttagcagatggatcaattaagacattaccaccagtgatataatcttcatgtgaaagttttggattattctttttagtttgagctgctaaatataaacacataccagttaaataatcttttggttgtccaacatccatccaataaccttgtaaatcaaatgaatataatttcttttcttcaactaaaattgggaaagtttcatgttcaattgatgttggtctcatttcaattaaatcaataactgaaggatttaaaacataaatacctgcattaattctattaccaacgaattcaactggcttttcaacgaatctatcaattctatttggaacatctctatcatgaacaataacaccatatttagatggttcatcaactttagttgcaacaattgttgcttcaccatcatgagcattatgaaattctaataattcttttaatggatattcacaaataacatcagaattaagaacgaaaattggtgtatcatccttttgtaaaatattagcagctaatttaagtggacctgcagtacctaaaggttcttcttcaacagagaaagtaattgaaacaccatattctttttcatatttctttaatgcaccaaccataacttctggtttataattaactgcaagaacaatatcagtacaaccagcatttgctaaagcttcaatttgatgtaaaatcattggttgattagcaaattcaactaaaggttttggataagataaagttaatggtcttaatctagtaccataaccaccgacgagaattaaacctttcatttttaatttatatagataagataatttgacttaacttgttcaacgaaagaagagaagaaataaaagagatatacaaaagaagagaagagaggaaagaaagaaggattaaataataactttaaatgaacagcacaaatataaatataaataaacgtcgacatttgaaaaaagaaaaaccacgtttcaacaacttttcaaaatagaacgccaaacagaaaaattgtcgacaacaaaagaaacgcgcttttttcttatttcgttgctatatttgctattattattctctagtattattattattattattattgtttaggatcctttattaatacaaagaaagtaacttaaaataagatatctatctattgagaaactccgaaactatctcattgaactcttcgctattatccaggtacatgttatgtcctgcattacttatctctctgtattctcctttactagacactctactaccaactttaccacattcccgatacataaaatcgtgttgtccgtaaacccataacatcatcctattttcgcaaacgtgtggctgttgtttaattttatcaattattgggaatttagcaacaatagtactatcgaaaactctcataattgcagtttcggcaaatgatgcacgtattaaacaactataattatattcaataaattttttaacttcatcagaatctttaatattaccacttcttaataatttaccaacatttctatcataaacaagctttggtcctaatggtcctaaccatcgaagaattgtaaataatgatattttcatattccaaacatctcgaaatttcttaccaattaatccatatctacctaaaaatccatatgatgtaatagaatttgatacattcatctcaatttcaccagtttgattctgatccttatttgaagaagatattatactctcatataatgggttagtaattgcaaatggacttctctcaaatccacctggactaaccattacaactttattaactctatctggatatttcattaaataacacataccaacatatccaccaaatgaatgtgcaattaaatcaaatttatcgattccattcaattccctccatctttcaagactttcaacgaaaacatcttcaacttctttgataaattctttatgatgatatagatattcaacaacatcttcccttttaacatgtatcttggcattatcaactcccttttccttactacctcttctaatatcttcttcctcgtcagaacaactacaccaatgtaaatctttactaatcttaccatctaaatgacctccacaattaatacatgtagaatattttccccatttaataccactggtacgaatatctaaattacccttaacttcactctccttattaaatctaataattggtctaccactcaaaccaaatccaagcatatcaattccatgtataattgtatctgaattcattttatttgcaatgcctccataattcttataaaaccatccattacatgctccatatccatgtaacataactacatgctttctattttcattcccattattactttccttttcaacacgtaattcattaatataccattgatcagaatcactaaaatcaacacctctatcttccatattatccaatttagtaacaacattataagatcttaatgatttatatttatcctctactaattgattatctctataactaggaaatacgtatttaaagaaattatccctggttatcttatcaccatcatcataattcatcatctctttcatccatactttatatgaatctttccatgtaaatttgaaattatctatgcttttcgaatagtttcttatagtaatcactctacttactactctattcattttcattatcattgccattgtcatcttctatatcatggtcattctaacaccaaataaacactggcaaacaccttcccttttaaacagtttccaatgggaaaatttggaaaactaatcatggggacggccccgccttttcgcattatcggaataaccaatgatagcctaagtctactattagtacaagatatatacatgttataatttataaagaatctgttcatatctacttagaagatacacatttaatatccttctccattgaagttagtaaatccagaaagtaagaaaactttgtagtatgatttcttacttatattattacaaaattcacaacttgaagttgaagatgcatcaacacatgaacctgcaaaataataattatctgcacctgaaccatcaaatccatgtttaaaataatcacatagaatagttttctgtaaatcttcaatactactaaattgtttttgaaacatttccctaatatattcatccttggctaattctggtatcatttcaatacatttatgaattggtattaaaattgttggaatttgaatatatttatctaaaaagaataatgcatttggaactgcatcatcacctaaatgaataactggtataccaacccaatattcaaaattagattgacattcatttaaaattgaatacattttcttatataattttggacatgatttaattctttgaaatccttgacctgtatctgacattctataatttgatccatcaaataaatcaaaatcagataaataccataattcaattaagtctctcataacataattccatagtccaagtgcctgtttaacatataaatattgtttttcatgattatgtgttaatcttgatccattatatccatatttaatacctaatgaatattttggatcattacctgaattagtgaaaaattgttcaagtttatctaacatattaataacaggtattctattcttattagtatatgaatggaaatcaccaattgaataaagaattgttctaatttgctctttatctaacccttctttatgatgatatttattggctaatgtttcaattgctctttccttttgtttaattaatctattgatcattaatcttgatttaccttcaggtctaatatctgcagttgcatctaatattaataaatcattaaacatattattagaatgatcatttgaattttcatttaaatatttttcaattgttaaaattggcttataaagatcaaattccatttgttccttaacttgttttaatcttgaatccattataatataacataatttaccataagtatctctcattctttcaggattcataatcttatatcttctaccaatttcaaaaactttttgataccattctgcattatcaacaaaatctttatcttcaattaatttttgtccaactttcatattggatgaaacaactaaacctgctaaaatcgaacacatttcctttaattgagtaattattctcttagttttggatgtataagatataatatcaactttatcagtatattcagaaactgttaatgcagcttctaataattttaataattgtctttcatcatatgaaagtctcattggaatgaatttaatatttttcttaatcttttttaaaatagtactatggtcattaacatttgtagtttcttcctctttaacatcaacatcctcatcttcctcgtcttcttcatcttctttaatttcatcatgttttccttcttctttattttctttattaattgattcaattccttcaatattaaccaatgttgtaaatttatgatctttacgtttaccacctctatgaacaaattggaaacaaactctacaataattttcatcacaatcattacaatgtaattcttttggcattcttaaacaatcaatacaaacctcatcaggacctaaaggtttgtcattgttatcaattgatgaatcttgttcgatatttttcaattggactttatcctcgtcatcattggaagtctccaataattgtgctaacgtatgtttttcttcagaagacatagtagggcttttatcagagaaagtatatcagagaagaagcttattactaaaccacggggtgtttgttgtggaaaatttccaaaatgatgtttccttcgcaacaaacagtctgtcgtgaaaaaatcttgaagaaacagcgtttactaagaaaacttaaattttcatagtaacttgaactccgacagcgaaatcaaagggtcctaatagtaataaatacttacggaagaataattacaattgtagaagtgaatataatttacaatctaacttgctaaatacattataagaactagaaccaaaattaatacttctatacttatcactagtagtaatatttaaaacagctataaaacggatctaattgaataaggttttggcactaattactagtgcgagtcttagtatgtaaaaattacccgtttgggactagtagccctaaaaaaaattttttttctccgtttcttttttttgtgtcgtttctttttattgtgttttagtcaaaattaagcatctattatatgactaaaaaattttcactttcaatgactttaaaatttattttgtttcatttaattgaatcctatccttccttttcttatttatcaactatttttaactatttttaactcaattaaactcaattaaactcaattaaactcaattatactcaattaacgatgtccttgtatatacgtgatgcaatgactccaattaatgatcaaaattcaaattactcaaatattgcgggttcctcagctttgactacaaatgactccgagaataccattatcaataataatgataataacagtagttcgtcaaatgatgaaaatgataaacaatctaatcgtacttcaaatgatttacataatagaaataccccagttatcaagtcaacttcaactttatcattgaatatgccatctcctcctttatccccttatactagaaatgattataatgataatgataatattccaacacttttattcccaagagcttcaaaacctttaactagtgatttaagatatttagagaatgtttcagcttataaatatccatctcatgctgttactccaaaatcttatacttcaaatatttcaacttcaacatcatcaaataaagataagaataccaattcaaaacctttacaaagtccatctgatattaaggtagcattcaatgatgaaaaaactgacactatcaaagagactaaaactgaaaataatgtctccgatgataactacattttaagtgaagattcaattttacatattaatccctataaacaaatgaataagcatggattcaaaaaattacagatcaattttctttcagaatatcaatttaaatcattcaatacctcatactcatattacaataataactccaataatacctctagtacctcatctaaatcaaataaatcatatgatacaactaaatctaacaccaactctaactataattctgattctgaattagagaaaagaagaacaagacgtttagtacgtcaaagtaaatttgaattagagacaattgattcaaatgaatcaataatttcaagaccttcaactccaacaattaagaaaagaccaacatctaatttatcatcaccttcaactccaaaaagacaacgtactgcaactcccgattatctataactatgattataaaaaaattgaagatttctgtcctgaactatcaactttaccaaataataataaatgtcttaaaactgattggaaaggtcaatcaatggatttatcaactgattcattaattaatgaattacatccagctgaagttatgttagcttcaattttaagattaccttgtgcagtttatttagattccaagaggagaattttccaagaaaaagttaaaagaatgagagctcatttaccttttagaagaactgatgctcaaaaatcttgtaaaattgatgttaataaagcaagtcgtctttttgcttcttttgaaaaagttggttggttcgatgaaaaacatttccaaaaatatatgaaataatttcatcaaaattataatcattctcaacaaatttaatatcctccaatatgcactcttccatgcttttaattcaaatttattctaataattactaatacacatacacttcactccttacattattgatttacagcttttttttccttcctttcaaatttatactactgctcaactggtttgcttttcacttttttctattatacattcaatacaacaatatatcccatcaatgatctggctttcatttatacatttacaatacctttaacttataatcattcactaatctttttttttttgcttctgctggtttcttatttttttgggaatatattatcaagatatactatttactttactttttttcattactgtttttgctttttcctggttttttataaaaatttaattattcaatattaatttacaattataacatttacttatcgtctagtaaaaaaaacagaataagcttaatttagctttagctaaataaaagttaaaaatattcaaaaaaagtaattggcctgtgccgctcccaggaatcgaacctgggtctcatcggccacaacgatgcgtacttaccactatactagaacggcttttattgaaagtcaatttttatggtactttaaatagtgtatacgtaaaaaacaaatccgccgatatatcatgatctagtgggtctatagagataagattcagatataaggctaaatacatttctttctttcttttgaaattaaaaattggttaaaaggtaggtttttagttttttgtaaaaaaatttattagttcataaaattcattgtttttaaaatgactttgtaaatatttgaaacaactttctttccttaatgaaataacaacattttaaaaataaataagcttaaaaattatctaaaatacactgtattatttattagtgatgcggaaagtttagcataaataatacctgatcaaataagggagactaatttttagatacacaactactggtatatggattattatctacgtcagtcacttaactgatataagactgtgaaggactgtgatatttttaaacagaatatcatttcaacactgtaaaaatctttctctcagtaaattaatacagtgaggaattaaaaattgagaaatttgtagatagtgagaagttgatgtcaaaaattatattattgtacagattaccgactaaatttgatgcttctttgatcaaacaaacagaatgtcattaacagagaccgagagaccatcaaacatagctaccgactcaggattcaaaggtaagttagtatatgataagacattagcgattgaatcaatatactaacatgttttcttgaattaatatagcaaatgatataaaggaaggatatcaaatgaatgaaaagattcttaatgaagaatataagatttggaaaaaaacttcaccacttctttatgatttattatatacttattcatgtgattcaccaccattatcaatccaatggcttaatgattttaaaacttcaacaaatgataataacgaacaatatattgaagcaaatcttttaatgggtacacattcaatcaaatcacaaaattttttgaaattagtttcaatatgtgttccaagaacattatctaatgattataaacaatcagaattacaatctaatataccaaatagtttactaaaatcacgacaattacgtgttgttagagaatggaatcatccaggtgaagttaataaattgaagattaataaatttaataattttgctgcatctcatacaaacagtggtgatatattattatttgatattaatgatgaaacatgcaaaactcataaatcaactttaaaattccattcgaaggaaggttttggattagaatggaatccacatttaaataagaaaaatttacttttatcaagttcagaagattgtaaaattgcactttgggatattaattttgaaaaactctccagtgaattaaaaccttcaagaattatttcaagtcatgaaaatattgttaatgatatatcatggaataaatcaatggaaactgtttttgcatctgtatctgatgattcatcatatcaaattcatgatttaagattatcaacaggtccaattgtacatataacaaatgcacaccatgatcctgattctgataatcaatttaattttccaattaatacagttgatttcaatactgatattccatcattatttgcaactggtggatctgacaattcaatccaaatatgggatttaagaaatccatcaattccattacgtagattttcaggtcatcaagcaccagttattggccttaaatttcatgaaaattatttattatcatcatcaattgataatagagtcttaatttgggatttaaatagattagaagagggtgaaccagataaaagaaaatcagattatcttgatccttgtttatcttatatgcatggtggtcatacaggtaaaattaatgacgcagattggcatccagttttagagaacttgatggcaacttgtgcagaggatggattattagaaatttggagacctgcacatcttggtgatgaatatattgaagaagagcaagaggaggaggaggcggaaaagaatgaagagactaaagatggtgaaactaaaactgatgatgttgaaatgaaagattaatgtgtgaattatttatttgtaataattattttaaaactttattatattatcttgtattttgttttcttttgtaatttaatattaatttgttcctttacagctatttattaatatattattgttattactatacaaagctattttacacattagttggtttaaatctaaacttcatcgcaataccgtttccagtttttaatttgaatgaatttatttaattcatcattctctgattttttctcttcaatagttgttaattgttgattaattttattatcaagttcatatttcataatattgtaccatccattatgtgaaatacattttcttttttcagagaaacataggtgatgaaatgggaaattaatatctgtatccacatccattttctcaccatcattttcattatcatcatcattttcagatattttctttctatagaaattgatcaacgattgtttcgtttcaggtattgagacatcaatatttatgaatgtattgtattctggtgtagatatgaactcttgccaagatttttcatcaagtaaaaggtttttatcaaatccacaaatatcaactttaaatcttttggatttttgtttactcttagatttagcctttgtttttttcttctgggtagtttcttcattatcacctggcttaatttcttcagcgttaggatcaaatgcttgtgttaatatttcattgatttgtgaaattacttccttcaatttgattaaatattgtagttttgatttaaagatttcagttttactattgagtaattgtaaatccgatttaaattgatcaagtttctctctttgtttatcatcaataatcaattcacccttatcgaaaacaggcagttcattacctatactttctaattctgcctttgttgacactacttgaaataaattatgaagttgatttttctctattatttgagttgagtttaaatgataatttgagttagaatttgtatctatatttgaagggaattttgcaatataagacttccaatattcaattccatgatcttttgaacaaaattgtgaattattttccgaatcaactggcttataacaatcaattaatttacattttcttttccataatgatttacccttatgaaataaatcatcacaaaatttgcaataataacttttaactaaatcctttatttttttgatttaatcccatacatttaaaatgaaaccattcatcacaaccgtcacatgcaaccattaatttacctgtatcaggtttcctacaaatacaaaagatttcctcactatctaaagaatatttaggagagtttttaaaaacatcatattgtttctgaagttgagcatgtgatacttcagacattatccattaatctgtattaaattagtagaacatgcactagattaatatatggtttcagcattcttggaaaattcatgttaccttgatataactgaattaatttttaaaaaatacaaatgcggcggtggtggcgcatgatatattatgataaaaagttacgtaatacaacaacaatctgatattacataatcatcacgtgacgtctataaaaattattaatattaaaaatactacctctctggttatcaatacaatagcgataataaaataaataaaataaaataaataatgacatgaaaaaaaaattattttattttaaccatgctggtatcattatatattatcataatatgccctgctgttgaccgtagtggttatggcctttaattatatcttccattttccaacctttcaagtcctttaaccctcccagtcgttggtttaaccttatattctatcattcattcattcttttactattgttgtccaaaagataaccttatttaactttatttgtgtgtgtgtgtgtgtggcataaatattttacaatagcttatctatactaggaaataaaataaaataaataaaaaaatattttttattattatcaatatgtcaatactatcaggtttccaatctccaggtcattttgttgaactattcattagagatattgaagatgtatgttcagctgataacgattataatggtgaacatttcggtgctcgtatatcatcaattttcgttgttttatttgcttcagcttttggtgctttcttcccagttttatcatcaaaatattcattcattagaatgcctccaatatgtttctttgttgctaaattctttggttcaggagttatcattgcaactgcttttattcatttattaagtcctgcaagtgataatttatcaaatgattgtttaggttacccttttgatgtttacccatttcgctttcggtatttgtttaattgtccttatgttaatgtttttccttgaattaattgcctatagatggatggaagctaaaatattaaatcaaaatttagatataaatgttcctcatagtcattctcattttggtgataccgctttatatgttaatgatgaagaacatcatcaaggtcacggtccatactcatgccgatgatgttgaacatgatcatgatattaaaattaatgaagtcgtacatgttggattaggtgaatgatcatattcatcatcaacattctcataatgatcatcatcataatgataatgcttcaattagatgactacagaagatgaccatcatgatgattatagtgaagaagaaattattgaaaaacaatccttacataaagataatgcattagatttagaaaatcaagaaaaagaagacttatcacttgctgaatatagtgctcaagttttgaacgtttttatcttggaatttggtattatattccactcagtttttgttggtttaacacttgcttgttcaggtgatgaatttgtttcattatatattgttatttgctttcatcaaatgtttgaaggtttaggtttaggtacaagagttgcttgtgttgattggccaagatctaaacgttggactccttggttattatgtttaggttattcaattagtacaccaattgcaattgcaattggtattggtgttagagattcttatcctccaggtagtagacgtgcattaattactaacggtgttttcgattcaatttctgccggtattttaatttatacaggttgtgttgaattaatggctcatgaattcttatttagtgatgaatttaaaggacctggtggttttaaaaaaatgatatgggcttatttagttatgtgcgttggtgccggtttaatggcattattaggaagatgggcttagtttccttcaatttcctattctttatttatagacttacttttataaaatttgtacattatataccctgttttttaaactaatctcgatttaatctaatttaatttgattttcatagaaaaaattataaagtaaaactacacaagattatacttcttcctcgtcatcagaatatcttttggatttatctagtgctgcaattcttcttgctctttcaatttcagtttcaccatgaatcaaattattattatcagaatctcttaaaacgacattacccctatcatctaaggtgtaatcatcatcactatcatccccattatcattctcattctcatcatcgtcatcatattcactatcatcactgtcaaaactttcatgatcattatctatagttatagaaggatgttgtgatcttgattttgaagttgatttagattgtgactttgaacttgattttgttctctccttcaccttggatttggtattattaaacttactactaattcttctttttaatgtcattctccttggagctataggtagttcaacaattgccttcttaggatctgcattaataaaatgtttgattttatcttcaatccctaattcaacaacttcatcattttcaggaattaaatcatcattaccatattcatttaattcttcatcaattgtttcacgttcctttttcagtccaaaatatcttaatgttttattaattaaattagcattatattgttcatcactaattccttttgataattcttctgccttttgtttcttaatattgaccttatatctacccaaaatttcaccatcttcattctctataataatatcatcattaactctataaccatgtaatttccttgttcttctaggaacatcattcttaaacaacatcatatcacttaaatcaataaatttatcatatgtactcttattagtgtttttcctactacgtgtggtagttgtattattagtttgaccttcatcattttctttcttttctaaaatttcagatatattatgttcactttcttcttcaccatcatcttctttctctttattaggtaatattgcattaggtataccaccaattgttgataaaattttttgactaacagtattagctcttgatctagttgatactttagattctttggaatcttgacttttctgtgatgctgaggtacttgcacgacttctaactgtatgtaatacttcaccatgttgatcttcaataactaaactatcatcataattaattgcttgtgttggtatacgtaattcaccatcttcatcataccttggttgtaaatcttcatcacataaatcaaaatttgttttaattttttcaagtactttagccttagcgtgaactttaagtctaacatcattagaagtaagtgaattttcagaatgacgtgatgcattagagactattctttgtaatggaacaactaatttaccatctctatcaagatcaataccttcaacatgttcatcaactttattaatatcatcatcatgaagatgttcattagtatcatcatgatctttttcattaatatttgcactattatttgttggatgtctattaatttcctttaaatctaatgtttgagcagttggaggagttttacgtttctttgattgtttacgtttcagtaatttcttcttcttctttctatttgctccaccacttggtctaacacgtataccactcgtttcaattgttggttgattacttaatgaatgtaatctatccataccaatatttgcattaagtcttgcattaattttttcatcaggtaaattatcttcatccatactggtatttgatgataatgtcatatctccataatcatgatttgccattgtatcaattcttttcaatgagaaagaagtaccagatctttcaattttaggtaatctattaaaccaattaccattaccattgccactaccatgaatatcatcagtttcaccctttgtccaagtcattgtaaatgtcatactttgtaattgtttacctaatgttaaaactgcaactgatgaaccatgaactataatacttgtaataattaaaaagcaaacagttggccaaataattctaattaattgataatattcactttcaactggataattagttgaaggaccatgagtaatatttaaaacatcagcttcaagatcagaaatcgcaataattgctgcaaaaactgcaccaacaccaattggaccaaaatgtccaacgaaaattgcttctttccaatttttcaagtctggattaattgcctttgttaataaaactgcaggaattcttcttaatgttaaaacaaccaatgcaagacaaattaaacgccaacaattaagacctaaaacagtatcattaaattcttgccatggaataattgaaccaaaatatacaaaatatgccatatttaataaaatatcaataacagttgaaacatttgattcttcaggttctatgagtaaaccaaccatcccaagcaaatgcagtacctgcacagaatgatgctaataaatcatcaatacctaagattgaaccaaaacctgcacataacagcgctaacattatgtaaaatgcaaggaaagattcatgatcaattaaatcatgatcctctgcatatcttaaagcttttctaccaacataaccaattgtactacctaatacacaaccgaaaacacattcatataacacagtaacacatatccaatctttagcaatttctgatgcatgtccactatgtaggataagattcaaagcaaggtaaacaaatggaacagagacaccatcattacatgcagattctgcacttaataaatttcttaaatgagctggaactctcttagcaaatttacccttaccgacaacagcttgagctaagataggatcagttgctgtaacacaggccgaaattaataaaccatgactaaatgttaaaccaggaatgattgcataaataaaagccccaataatcaaccaaccagctgtcatacacggtattaataaaaggaataatgaaaaccaatgttttaaaacatattttttaggtaattcaactgaaactgcaacaatttcaatacatagaagaactcttgaaagttccaatgtaatataaaaatagttcccccaacttaaaggattaaaccaatttaaacaatgaggaccaacaattaaaccataaattgttgcaactgaagcttcacccagataaagtttttccttaacgaaaagtgaacataatgagaaacaagcactaaaaacggctataactgcatatgcaacatgtgctttagtaacatctatttgagaccaaaccatcaattatatagtaaataaaataaaacgcaaatgaaaacaattagtaaatgaatgtatcgaaatagaataatatagaatttgtaataataataatataatataataaaataaactttagatgtattacagtattaaaggatttaacaaacgcagataccagaaaccggctagcaaagcgactacagaaggaaggaatacaaggaagtagaagaggtgaaataaagaaagaaaagtacagttaagaaatccagcaacaatgcaaagggtcctgtccttcaagataataatagaaagtgagaattttgccgtatttaaatattttcatgttctgatcttctttttattttgttatctgggggttgtatcttagagtatatactgatgatgatgataaaatggggatagatacagtttgataacactcaattgatactctaataaagtctttaatcatcaactacaatctttgatcatctcgtgtactgagctcttatcattagtgaaatgattatatactgcgccgcacaaaaattatgcgccgcacaatactttgacacagatcgacgcatcgacgcatcgacgcatataatttttaattataacttttaacatgaaaactcgttagttgaattgattgaatcaaagtaaagtaaagtgtaaaaatattaatagcttctcttaaaccaaacagtagactgagtcattaaatggctaaacaaaagaagtcttcaactccagatcctcaaatagaggattcaaagagaaattctaaaaattctaaaaactctaaaaattcaaaagatcagcaatctaatccaccagtaaagaatggtagagcagtagttgcgcagacagcatcttggacaggtaaattaccttgttctctattacatgaacattctcaaaagcaaaaatggaataaaattgaatatgatatgattaaagttaaagatggttttattgcatttgcaaatttatcttggaaaaatcctaaaactaatgaattaattaatgttaaatttgatacaccaaaatcaattattcaacctcaggaaactccattagaggcacgccattatgctgcaacttatgcattacatagaattgcatcaaataaaaatattcatatggttttaccaactaatcataaacatatttggagtgatttagaagttgaaaggaaaaaaatggttaaggaaaatccttcaaaggctaaacttcattatgcaaatgatccattcatggctgttttagaacatcgtaaaaatatggaggataaaatgaagaaggaagaagcattaaaggcagcttcagctaaagttaaacctaaacaaattattattggtaatccaatgaaaacttcaactcctaaaaatacttcattaaaaccatcagtcaaaccgcaaactgtaaatgttgcaaactctgcaagctcttcaatggtacctaatgtttcaaatacgtcaaaagtttcaaatactacaaatactcagactacttcacaaattgaaaacgcttcaaatattgctccaactgaatcgcaaaaacaatctagcgttccaaaaagccctggatctataccacaaactactttccaggaattcaatttataccatacaagatacaaataaaaccgccatttcatttcctaaatatgaaaccgaaggctgcagctgaattttatcttagttcagaaatggagaaaagctattgcagaagttattaagaatcaatactcctggactgaactctcttccaagaaaatttctacgatggaaaatcatattaaaaaaataagatatcaattggatgcaataggattcaaaccttgtcatatagaggaagctttaaaatataaaattaattttgatgatatacttcaatggttattaatatatttacctaatgatgcaatacctgattattttttaccaaaaaatgtgaagacaactctgaaagttacacaaaatttgaaaagggaacaaatgattactcaattatctcaaattggtctccctacaaatataattggtaaaacattagatgataataatttaaatgttgtacaaaccgcagtcaaattgactcaatcttttgcaaataatgatgttaaaatactagaagttccaagtgatattgattcattaaatgaatggttagaagaaaaagaatctcttaaaattatatttgaatctaaaattgttgatcaatcaccacctaatgatgacattattgaattccatcttgcaattgaaaatctagaaccaaaacttttgtcattagttgcttatagatctgaatgttatccttatgatttatgtggattaattttaagagttaacaattcatcatttgttttgccaaattatattaaacaatcaataatgactcagcttatccaatatttaagtgatattggagcttttggaatgcactatttattttcttgtgttgattggttagaacaaaatataatgcaaattattgaaaaccctggtcgtatatatgatcctaagaaacaaatttcaaatgatgtcaataataaagataaagaaagtaaagaaaaattaaagaataagaaatttggctcatctaatagagcacttgatgttgattcaataaaggctaattatgagaagaaactggattcaccagaattgaaggaatctattaaaaatagaagtaaattaccagcttggaaaaagatggaagagattgtgaaaacaattaatgataatcatgcttgtttgattactggtgaaacaggttctggtaaatctactcaaattgttcaatttatcttggatgatttgaataaaaaaggcgatttcaaaataaaaattgtttgtactcaaccaagaagaatttcaactattggtttagccgatcgtatttctaaagaaagagtcgataaatgtgggtctgaaacagggtacattattcgtggtgaaaacaaaactagcagtttaacaagaatttcatttgtgacaacaggtgtggttcttagaatgattcaatctgttttcagtgactctaaggatgattcattttttgaaaatttaggatatatttttatagatgaagttcatgaaagatcaattgatagtgatttcttattgattaattttaaagagaatgtcatctaaatttcctaatttgaaaattattttaatgtctgcaacaatcgataaaactatattcgatggattttttgactgaaaataaatctgtagaaaaaactaaaattgcacatgtccatattgaaggtagaactttcccaattaaagattattatcttgatgatgttttacatatgacaaattttcaaattcctgattacagaatatctggtaatgctaaattttcagataggattgagattgaagacaatgatgatgatgatttcttagatattgatgaaaatgatgagattgaagaagatgttaaaatgattacaccaacagcaacatcacactttttccgttcaggtagtattaattatacattaatcaaagaattagttttaaaaattgatgaaatgttaactgctgataatgataatggttctattttgatattcttacctggtgctatggaaattaccaaatgtttgaaagagttagaaaaaattgaatctttttggacattaccattacattctaccttgacaccaactgaacagaaaagaattttccaaaatccaccatcaggtaaacgtaaagttattgcatccacgaatgtcgcagaaacttctattactattccagatgctgttgctgttattgattcaggtagagttaagcgggttgaatatgatagttcaactaaagtttccaagatggaagaagtttgggcttcacaagctgaagtcaagcaacgtagaggtcgtgctggtcgtattagagaaggtttatgttataaattatttacaagggaaactgaagaaagaatgaattcctcagccaattcctgaaattttacgtacgagtttggaatcagtttatttaacagttaaagcaattggagttgatgatgttggttctttcttaaaagatggtttagatcctccatcatcttatgatgttgaagatgctctgagaaaattaatacaaattggagcaattcatgatcttgactttttaacaccattgggtaaacatttatcaatgattccaacagatttgaattccggtaagttattgatttttggatgtatctttggttgtttggagaatgcattgattttggcagctatagctattactggatctcctttcagctgtaaacatgaagatagggataagatgaaaaatgttcaacaaaaatttgcaaaaaacaatggtgatatgattgctattttaaatgcttataatgaatacagctcaattaattcatttaaagaccgtaagaaattctgtaccaagaattttatttcaatgattagaatgaatgacataacatctactaaaattcaatatttaaattcattaaaagaacttggttttatcccatttgattatagtactaatgaaacatcaaagaagaaattaaacagaaataataataatgttaatgtcaataaggctattttaaccacatcattatatccaaatgttgttaaagttgaaacacctccaaagaaatatattcaagcagcagagggtacgattgcacttgatttttcatcaaaggatataaaatactggatcaaaaatgttgctgagtatagaaacttgaacgaatattctccatcaaataaaatgagaagtccacgtaaaacaagagttttctttcatccatcatctacacaatttcaaccaaatgctaaatttagtagttatccaccatatatgatgtacagagaatctcgtgagacaaataaattatatcttttagatataacacctactaatacatcatcaatgttgttgtttggtggtagattgttatactctgcaaaaaatttatctactattgtaattgatgattggttattagtcaatggtattccaaaacaaatagtattgatgaaatatttacgtggtgtacttgacaagattataaataatcgtttagatgatccaacatcagatgactatgaagatattttaactttgattgaaaaacttcttgcaatgccaaattagttttatataaatttatagaaaagcctgtattttatattataaattatactattcatttaatctccaacccccatgagattcaattaaaacattttcctttgcccaaaattctaaacttgatttcaccataaccaacggcattttcaagttcatcattataatacccattttaatatcctttatgctagaatcattaatgaaattcaatacaagtaatttttccaacgtcactctaaaaggtttattcacaccaccaatttcaatgttaatatcaactaaagtttgttcaggatgtaatgtgagtactctatctttttgaaattgctcataacctttttcatatttctccaaatcatcctttataactttgggataaacaaacgtagatgccttaggtgataaatttggccaaaaaatataacttaaaaacactccatgtatatcattaacagtattcaccacatcatgtatttctgtatctaacagtttactcttttgaatatcatttatcataatatcaaggatgttaaaatcgtcatcaacaaatttagtcttgagaagagacaaactattgaggatatgtgatatatcataatttttaacagttaataaatctaccgagaatattttaacaaattgatcaataaataatgaattatcatcaaatattgaagtaagtgaatcaataatatcatcaattttaccaatttgaaaatcaggtaatgcatcaacaggatctggttgccatttaagcgttcttttcttataatttctagattttgaatttgaatttttagaatatcctctaacaagttcactatttaattcaattaatttgttttttttacgatctgttgtcaataaaccattcactattttttcaatggtatcatctcttgttcttaaatagtttcgtattggtcttgcaactttatctaataagacacctctatgatcaatcagtagaaatgaatgaattgtcttgatataataaattataaggtcaacagttttaacacttggtaacaaaagtttttgatttaattgctgaataaaactttgaacaagtttatcatgatatgtacttttgtcaagacatctattaatttctttcatggtttctctggtgaacggatatttagatataagatggtataaatctttaattcttcttttgattaataagtttttagcaatcagaaacaaaccttctctaaaagccattacatttttcatcgaaacataagaatcaaaaaccatgaaaacatctagttcaacccatttaaccaaagtaccataaataggatcatcccaatatattgtatccagatgtttggtaattttcgttttggatacttgaaacataagttcatccagttccgagtataaattaactttcattaatactttagaaacaaaatgtaaatccccatgattttcttcaattataaaaaaattaagtatatctttccatatctttttcgtgtaaccttgataaatacagaattctgatcttttaagtaatattatgtcaagatcattaaatttgaaaatgatatataatgtatccatatgagacgatgatgcttcaatccatttgaaaaaccccagaatatctgatttaaaactcaaatgaatatctttatattttgaatacagtaaacgttgaaatactggtaagtaaatgtgtccctgtttaatctttcgtatcaatgcggtgatttcattggggaattcttgtttttcaggaacattcagtgttagtacttgttctgacagccagtttatcagcatagccgtatcactgttatcataaccgtccataattcttcttaccagttgataccatccagaccaaaagaaagtttaacatgatagacaacatcaaaattgaaaatgtcaacatgaaatatggaattattttaatttcctaaacgggtaacccgcgatctcccccatttgaaattattcatgtaacggctcttcaatagtttcttaaaacctttgctcagcttcctttgtggaagtttagggatattaaggtataggtatagatactaaaatgagtgccattgataattttgtccaagttacaggatgcaatgattatcaattagcagaacaattgctgaggaaacacagattacatttaaacgatgcaattgatgattattacacaaatcatctctctcaggggtcacataataatgccaacttgaatgtggaagctcttgaagcaatattttctcaatatgcagataactcggataataatatcatggatttagatggaactatagcatatttcacagatctaggaattgatgtggaaaatgatccacaggcattagttgcagcatacatacttgagtcaccatcaactggtgtctttaatagagataagtttataaaaaactgggggaaagtacaaccatcaataaagagtataagtgatatgtcagaatatcttaattctgcactaaatgataatatattaatgaaaaatgtatataaatttgcatttaaatatgcattagaagagggtcaaaggaaattggcaacggatgatgttgtagcattatggaaatgcttttatcagaatgagtttaagaacctagagatcaatggaatggaatcaactgtaactaaatttgttaatgattatattggaggtggtaattgtcgaaaaacgcaaatcagccaagatgaatggaatatggcctaccaattcttccaaatcccattaaatgaactctcccaatacgaagaatcctctgcatggcctgtgctgatggatgagtttgtagacttcctcttagagagggagtaagtattaaaagataagattacgtaattacactaaaaaaaataatttttttttaattaaatttattttatgacattgaaaaatttttaagtttttacaattgttaaaggaagaacaggtatatataggatcaataggacattaactaaccaaacaatggttaaatcatatccaagatacatacaagattccgttattggtgtgatttcatccaaatctaatttgatttataatgaagattctaagacaattttttcatcagctttagattcagttattgaatggaattataaaacgcaaactcaaatttcaagaattactgatactgtaacccctggttcattgaattcatcatctttattaccacctgctgaagttacaagattagcttactcaaaatttgccaatttattagcaattggattctctaatggtgatattaaaatttgggatttatcaacaaatagtgttattataaaatttcaaggtcataaatcttcaatttcatgtcttgaatttgatccaaatggtacttcattaattagtggttctaatgatacatcaataattatatgggatttaatttctgaagttggtttaattaaattaaaaggtcataaaaatacaattacttccattcattattataatgaagattatttaatttcaacatctaaggatggtttaattaaaatttgggatttaaaattaaatcaatgtattgaaactcatttagctcataatggtgatacttggtcgatgaaagttttcaaatataatgaaaaagattatgttttaacaacaggtatagatggtgaatgtaaaatttggaacttaaatattgatttagatgatggttctaaattaaaggaatttggtatttttcaaaagcaaagtaaaaatagagttgttgatattaaatttgattcaattaatcaattattaattttagcaaatgctgataaaactgttgaaattttcagattaagatcaattcaagaaattcaaaaggcaacaactaaaagaattaaaagattaacagaaaaaggtatgagtgaagaagaaattaatgaatctttagaaaattctaaaatacaaatgttgatttgtccatttacaataatctatacagaatctaagattaataatatttgtatgataagttcaagttctaaagatatcaatttaattattaacaattctaataatacattaaattattggaagataaaattacctgaaaatataaaaaagcataataatattaatgataaaattgctactttaaaatattcaattgagagaccaggacatagaaatgatattagatcaattgatataaatgatgatgatacattattatatacaggatcgaacaatcaaattaagatttggaatttgaaaacacttaattgtattagatcaattgataaaattggtaatgttttatgtggtaaatttttaccaggtggttcattattagttattggtttgaagaatggtgatttaaaattaattgatttatcaacaagtgaagttattcatcatattgaaaatgcacatgaagattcaatttggtcaattgaaattacatctgatggtaaaactattttaactggttcatctgataaaaatattaaatattgggaaattaaagttaatacattagaaaataaattaaatttaaataatattaaaacattagaattaaatgaaagtatcatttcaatgaaagtttcatcagatagtaaatttttatcagtttcattaatggataatacagttaaaattttcttttttgatacattaaaattttatttaagtttatatggacataaattaccagttttatcaattgatatttcatttgattctaaaatgattattacatgttcagctgataaaaatgttagaatttggggtttagattttggtgattgtcataaatcaatttttgcacatgatgattcaattatgaatattaaatttttcccagaatctcataatttccttacatgttcaaaggataaatttattaaatattgggatggagataaatttgaacaagttcaaaaatttgcagctaatttaggtgaagtttgggggatttcaattagttctgatggagaattttttgtaagtgtttcacatgatttcagtattagattatggaaacaagataatgatgaagttttcattcaagaggaacgtgaaaaggaaatggatgaattatatgaaaatgaattattaacatcattagaaggtgatgatataacaccaagaaggaaaattgaggatggagaggaaggtgaagatgaagagttagatgatgcagaggcagttagagcaaagacaatggaaaatttaaaagctagtgaaaaacttattgaagcattagatatgattgaagatgaagataatgcattattaaaggcaatgaataaaacaccaagtgaatatttatttgaaacattaagtaaaatcaaaccaaatcaattagaggatagtttattagtattaccatttagttatacaattaaattattgaaaagtataaataaatggactagaaaggatgatttattacaaaagcaatcagcaagattaaatttaatttgtcgtacattatttttcattgttcgtgcaaatcatatggaattaataagtcaaaatgatgaaattttcaagaatgaaataataagtttgaaagaacaattaagaagtatgatcaaggaaactactaaaaatattggatttaatgttcaaggacttaaatttttacaaaacaaatggtcacaggatcacacacatatctacgacgaggagagcgagtctacagctgttaaccctgatgataaagtaagaaagagagtgtacactacacttgcataagtttgtaatactttgtaatactttgtaatactttgtaatactttgtaatacttaatagaaaatagaataagaaaacgaactccgttaacgccgacttccataataaatttttttttcaatcacccgcttaacaccgaagtcatcaacatgaatttatttagggacttttctccttttctttaagaactaatctcattagataccaccggtaagtatgtctgatacaagaatgaagaaacagagaaatagagcatcattggtttgtatgcaatgtaaaattaagaaaattaaatgtgatcgtggtaaaccatgtaataattgtattaaatcaggtaatcattcagtttgtgtttatgattatataattgaaaaattggatgatcaaacaaagagaatttcacaaattatgacaacaatcaaatcctcatctccaagatcaaattcaattaaggagaataataaaaacgatgatgtgaataataatagtgataataatagtgataataatagtgataataataataataataataataacaataatctgaggaatcatgtagataataaagaatcaaattcaattatggattataaatttaatatgatacaaaaatatattgttttcaggaaaccatcaagaacacaattaagaccacattttatgtcaacttatttacaacaaagaaattcatttgcaagacatacattaatgtgttttaaacaagaattaaataaggagaggaaattatggaaaatgaaaaattttaaattgaatatgaatttattagatttacattataattcaacaactaataatgatgaattaactaaattaattgataaattagttacaaataattattatgcaatccttgaaaggttaacatttttccaaaatgaattaaataaagttttatttaattcttatatcccaatgggagtaattcaattaattttccatcattattttacaattcaaccaaatggtgttatatttaatggagtttctaaaaattttgaatattcatttattgcagttataacatcaattattgaacttgttgatattttcactaaaattgatactgaaaaatataaatttaatttcccattaaaatgtaaaaataatcaatttaatcaattaacattattattaatgaatagtgcaaattatagaaggaaagcttcaattttttcaatttatacattacttaatttaagattatcattaatggtttatggagatttccaaagtggtggtatagcaggacaaaattcttatccattatttcaaacagctgtttcaattgctcatgatttaggtcttgatttagatcaaaatttaattacttatatggaaaaaccggatgttggtgataataataataaaatggatgaaattttatttgctaaagagataccattagaatcaactaaattattatggaattatattttaatgttagattcatcatatacaattaatttaactgtacatccagtaattgatgaaagatttacacatggaatttattttactgataatcatagtcctaatcatattttagataattcaaatgatttattaaatagttatgttacaattataagggaaatatcattattaacaatgacaaatgaaaaaattacattaaaaaaattttttaaatcaatggataatttaaaaaatttaatttcaagatttgataaatttaataatattaaagaaattgaaaaaaatgaagataaatggatttttttaaagattaaatttgaattattaaaatgttatatgtcaatgataatttatattagagcatatagtatcagaggaaataattaatgaaattttcccaaataatttaattaataatactaaaaatattgaaattattaaaaaaatacgagatgaatgtgatattaaatgttcattaatttattttttttcacttaatgcagttgttgagattagtaaattaagcaataaatttgttttatataatagagaaatttttgcaacatggtttggaactgaatcaatgttatttatggatatagttgttaataatgatatgaagaataaacaaaatattgatccaaattgtgttaataataatgatattaatgagaatacatcatctaaattacctgatattgataaatttgatattaataaattagagaaatcattatatgaaaataagattaataaagaaagtgaaattattaaatatgtacaggaattaagtaaacctgataaattagcaacatttttaacaaaatcatatgaaagtgtaattaaatcaagtatattagtttcgaattatacatttttcgttatggcaaaattaattttaattttaatttattgcctttattgttatattcatttaaagattaattcaaatttagaaattttagaaacttttaataaattaaaggaattaacaaagaaaattgttattattcatgaaaatcctggtagtttaactgataaaatttcacctgatttaattgtgaatgaaattaataatgcacaaaataatgttattaacaatattaatgagaatcctaataataaagatgaaattacatcaataatttcatcaaataatgaaattattgaaccaattgaatttttcgataatgataatttattatcaatatttaatgaaattaatgaatttatttcacaacctgattatagtatttaattaatgctaaataaatattaatattatttcattatatcgttatatatattatgtatttttataaacaagttaatttaatttaatttatagacaagtaatgtaaattattaaaacatacctggcataccacccataccaccagcaggaggtgcagcagcaggaggaccttttggttcaggagcatcaacaattgcacattcagttgttgctaataatgaagcaacacctgaagcatcaactaaaccatttttaacaactttaaaaggatcaataataccagcttgaatcatatcaacatattcaccctttgcagaatcataaccaatattaaattcatcagaataagaatctaaaattttaccaacaacaactgaaccttcaccaccagcattttcaacaattttctttgcaggttttaaaattgctgctttaattgtatcaacacctaatttttgatcgaaattatcagttttaacattatctaaaacttgagaagctttaattaaagcagtaccaccacctggtaaaataccttcttgaacagcagctctagttgcacataaagcatcatcatatctatctttcttttcaccaacttcaacttcagatgaaccaccaactctaataactgcaacaccaccagataatttagctaatctttctaataatttttccttttcataatcagaagttgaaacatcatcaattgtacctctaatttgttcacatctttgtaaaataacatcttttgaacccataccattaagaacaacagtatcttccttagtaactgtaattgaacctgcattacctaataattcaggagttgcattttctaatttaatatctaattcatcagtgaaaacaggtaccaccagttaagattgcgacatcacctaagatattttttctattatcaccaaaacctggagctttaacacaacaaacttgaacttgacctcttaatttatttaagatacaagcagctaatgccttcaccatcaatatcttcagcaatgattaataaaggttttcttaatttatttgaaatttccaatgaaggtaaaatatcttgaattgttgaaattttcttttcacttaataaaatgagaggattttcaaattctactttaccagatttagcatcagttataaaataaggagagatataacctctatcgaatctcataccttcagttacctctaattcatcttctaaagttttaccctccttgatggtaataacaccttctttaccaactttttccattgcatttgcaagcatattaccgatatgtttatcaccattagcagaaatagtcgcgacttgggcgatttcctctgaagttgtaacttctcttttattcttggagaggaaatcaataactgcatcaacggcagcttgagaacctcttctaagatccattggattacaacctgcagcaacatttttaacactttcagcaaagatagatctacctaaaacggttgcactggttagtaccatcaccatgcagattcattagttttggatgcgacatcttgaattaatttagcacctaaattttggaatttatcctctaagatgattgatcttgcaacagtgacaccatccttggtaattttaggagcaccgaaagattgttcaataataacatttctaccctttggacctaaagtgactgagacggcatcagctaaagtttcaacacctttaagtaaagccgctctaccttctacaccgaacttaagttccttatgagagatggaacgagagaatgatttgagaggggaagtagtattcttagcaatagatctgaatgaaagcatttgccaaaggaaggaatgctggataaatgatataaaagtggaaatacgcagcttatataataaacagcagcgaagagaagagaattttctagaaaaagaaggatacttactatgacagtaattggtgttgtagtaagtgttgagaggtattgttagtattaatggatgttaacagctgtagtgttctttactggtatggagtacttgctattacactctctgtatcctagtagtatggcctctcttatctgtcgggtgtctcctagtactaccagtagttcgtacatcacattcattctcaaaccattcaaaggttatattagacacaccttcacaacatctacgtacactttcacatatctgtattgtatcctgtttagtgattgtgtcctgattgaataatggtggtgatgataatgatatatctcccttgaatactgattcaattattcgtaaaattgtattgttattggtattggtattggtattgttattggtattattattattattagtagtgatggtattattactaatagtattaccactattaccattaccaatactatgacttgatgtattgattgattgaatatcaaaattattattattaacagtattaataatactattattattattattaaaactattactatgtctaacactcaaaacactatcttcactctctgatgtttcatcttcatgtctatacctattactattactatcttcattccttaaatgaaatactttcttcagcttttgttcaattttaactaatttttcacttttatccattgtctgcagaaagaagagagtattaagtaatataataatctttttatacccccccttcttcctttaacaatgattaattatatcattatatcatcatctggtaaacccatttatgcttttgataataataatataattgtatattctgcaattattcaatcaattgtatcttatttcacttattcaacttcaccaaatcaattaattaattcaattaaaaataataattctttcattaattttgctcattataatcctttcattttaatatcaatatcacccataaatcatcactccaacccttcttcattatcaattctttataattaccttatttcattactttctaaaccttatattgataaaattttcaataaatatccaaatttcgattttactaaattattatcaaattctgatattttaacattaaattcaatttgtcatgatttatcattaaataataatgccattttcaattataattcattacaaacattaccaataaattataaaattagatctaaaattaattcaaaatttaattcattatcaacatcaaatttattattcggtttaataacaacatcaaattttaaacttatttcaattttaaagaatattcaaaattctaatcataatttacacatcagtgatttatcaatactatttaaaataatttcaagttcaaataattttaaattaaattctcaatacatcacaaatgaaactttttggttacctatttgtttaccaaaatttaattcaaatggtcatttatatactttaatacaatttgttgaattaaatgattcgaggtatcaacaattacatagtataagcgcaaataacaataatacagataaactattaattatactaatgtcaccatttaaagactcatttaatgaattaaagaaaatttcaaataatttaattaaatcactcctatttaataagaaaatttttaattcaatttataatccattatcaattaatttaccaattccttcatcaattatttcttacacaattaaaaatacttcattacttcaatttatagaatcccattcaaattcttcattatttccattaaattttaaaaattctacaattattatagaaaattattcaaattataaattatttgcatgtaaattatcaaattatgaaatttatcttaaaattaattcatcaacacctgaatctcaattattaccaatttctaaatcaattttaaattattgtattttaaataatcatcatttatttattcaataaatttccctttactataattaaatgctttaaataatgcaatataatgtgataatcctccaaatacaactaaaatatgaaatatttgatgtgaattaccaaatttatcaaatttaccaatataatatttttcaggtattctaaatgcatataagaaagcacctaaaagatagaaaaaaccttcccaaataatatatttaattgataatttttccattgcaatattaattggatatattaacataattgtaattattggtaataatccaataaatgaaaataaaataaatattgaagtcctaatgacaatccattcacttgatttaaattttggattccatgttaaaattaatgctaaattacctaaaataataattccataaatgaaaatactcctcatcattggattatcacttaatccataataaattatactaattaatgaaactgaaattaatattaaaatacctgcataatctaatttactacccattgatgcaacccccattgaatgaactttaattgtatggaaaattgatgaaaataataaacaaattgaaaatccaattataaataaattataaattataaaatcattacctttaatttcataattaattaatagcgggataactaaacttggtattaaatgtgtaaatatattaattgtttcattatgaaaataaaataatgatttataacattcataaattgattttgtttccattatatatcctgttaaaataaatttattatctctttgccataggggggatttcattataatgaaataacttttctcttccatttagtctttgtagttattgtaaattcaacattttcatttgttgtaataattgtagttcttttaatcattgtgtaaagaacagaatcatgatgtgatggtttaataaactccgaaattttcattctccattaactgtacgtaatgtaataaattaaattttgttgagccatcttatcatatgatgaattaggccggacttaaaaacatgttgggttttattattacttgttatactaacaactactgatatgataaattttaattgaatttgaattttaatttatacacaaaggtatattaattttaaataaaacaaataaaacaataaagaataataataaagataaagataaagataaattctaaaattagattaataaagcagctgcaattgcaagagcacctgcacctgcaattggtgacaaacctgctgcaccattatgagaacctgatggtaattcagaacctgatttagtagttacagaagctgaagctaattcagtctttgaagtggattcagtctttgaagttgaagtaattgtatttgaacctgattttgaacctgaaccacttgcagttgcagtttcttcagcaaattttgatgcaccattttctaaagttgattctaatgaaactaatgtagtagttgaagtaaaataattttccttaacttgagaactatattcatctgcccaaactgatgaaattgctggtaaaatacctttacctgcaatattagttgcagaaatatttggtgctggtaatgcaattttttcatcaaataaataaccatgataagtttcattattaaccataaatttagtatcaacatctttattagttaaaccttctgcatcagctaatgatttccaaatatttgcagtaacatcatttctacctaaattatataaatcccaattaacttcagctgatgcaatttgtgaataatgatcatagaaagttgaatcagttgtaccctttaattcatcatcaattacaccacctaataaaattgagaaaacagtattttgttctgcataagtttcattttcatcaaatgtaattaaaacaagtgtattattcataaaatattcattttctaataatggagtaacaaaatctcttgtccatttacctgcaactttaatattagtatcatgagcatcatttgtcatatttggagtaataatcatatattgaggtaatttttcatcctttaaatctttttcaaattcagtaaagtttttcataactgataatctagttgcattacttgtataagattcatataaaatgaatggattatgttttctaacataatcatttgcaaaagtttcttgatttgaataattaaaaccagtaaaaccagtatatggtaaatgttcttgatatgaaccaaatgaaattcccttatcatctaataaatcagctaatgttgaaacattttttggtaatgaagtaaatctatcatcatctaaggcaaaataatcaccaccaactgatgacatataatttggttcagaaggatgtgtaacagcccaataattagttaaagtaataccatgagaagcaacccaagccatatctggttgttcagcagcttgatcaaaatcagtattttctaaccaaataacgacaaatctatcgaattttttacctttaatatcagaagtccattgtaaagttttagcagaagcagcagaaacagcaatttcacttgcacttggttcaataattgattgagttctttcaacaacagttgaagatgatgtagtatcagcagcatttgaagatgcaataagagaagatgcaataagagcgagagttgataacttcatttttttagatacttttgatgatgaaataggtttttcttggctaataaagggagaaataaattatgataatttaaaattgaatttgacataaatgtgggtaaattggattcattttataaaagaaatcttgataataattagtactagtacaatattaagcaacggttaatttaattaacagaataataaccgtttcagtgggtataataattaaatatccactttgtattaaaacgtgcagggaccaataattaacctagtattcataatcataatcataatcataatcataataataatcataatcatataataatcataataataccataaaacgataataatcataattcaaaactccgatggtaaataaaataaaataaacttttaatactaagcgcggcgctaaagtaatttccacgtgtgttcccttaatattataatattaccactatattaactcttattggttattattttaatcttataacaatatcttatcatataacacatgtgtgtgtaataagtaagtgtaaataacatcaatataaatatttaaaattatttcattttatttcattttatttcttaaaattattaacctggtaccaacactatgaataaaattatcaactgttgaaatatcattccttgaaataatttcaccttcaattgatacaatactttcaagtaaccaaattgcaattgaatatcctctctcacattcctcatatctttctctaatttttgtttctttactatcagtataattattattattatcattattatcattttcattttcattaattttctcaatctccatttctttaattgccgtatccctacaaatttcaatagctctatcaaaaataattttctcaaatataatattttcattcttttcatttttattattaccagtctctaatttattaatcttaatcttcaaatattctgccttttctaatgattcattaaatttatttctaatccattcaattaattcaacaatcttattattattgttattattattattattaaaattcttaaatttattacttttccaccattcattacaaatcttaattgcttcacttaaataatctaatacttttaaataaataattaatccttccttacttgtcttaatatccatttctctcaaatatgaattattataattataattatcattatcattatcattatcattaatatcatcagcttcatcatcaccatcataaacttcatcatatttaactaatccatataaactaatacaatgtgacatcattgctaatctttcaacttctctcataaatttatcatcaattattttatttttattttcattattatcattattatcattattattattaatatcactcatctttctattaatcaaaccacctctcataccactattggttctattaataataatcttatcaagatacttttcttcacgtttcttttctaactcttgtcttctttcattgtccctttcttgttcttcttccttatctttctccttttctttctctatttcgttatcagcttttaattcattatcgagtcgttttctaccatatccccttgatgttaaattagctccaaataatttctcactagtataatctaatacttcctttaatgctgtacttggacttacactcaatgaatatcttcttgtattcatagaattctttcttattgaattataaggtctaccattattattatcattattattgttgtttgccatttgaatctcatctgcaaatgaatttatttcaacatttcgcctttcaacgacaacataatctttttcaaccacaacgtcttcatccttgattttatttttaggtttacttgtatttgttgtgggtatactatttaattgattatcatcatttcgaatgttaacattttgtgcacctttcaaaatttcttccaggaaagtgttcttagctttgattttagtgtttttatttttcaaagatttatttttcgccatgtctaattctttttctttttctttttcttttttctttttgttcaagatattttttatttgcttcaaaactatcaccaccaggttcttcttgaattattgatattttattaccttgatcaatttcattatcatttttaactaatggtttaccaattaaatattcacttacatacatttcttcattatcaaatgaatatgtaattgaatcttcccttattgatgattccattaaataatcatttgaaacaattattggatcattgaaaaattcattaaatcccattctatcaattggatttgcctttaataaactacaaattaatctctttaaatcaggtaataaatcaatattatttgggaaagttataatatcttttgatttttcaatttttttcaataattcaatatgatttgatgctctaaatggaggtttaccaattgtcatttcataaataactgtaccaactgaccataaatctgcctttgcattatatttttcatatcttaaaatttcaggtgccatatataatggtgaaccacataaagtttcagccattgaagttgatggtaaatatcttgcaaatccaaaatctgcaacttttaaaattggtaattcccataatccaacataattattatttataaaatcatcccttgtatgaactggagtacataaaagtaaattttgtggctttatatctctatgaattaaattttgactccttaaaaataataatgcagatgataattgtttaataaaatttattactaatacagtatttaaaccattagaattttcaggtgaaggatatttttccaatacatttttaataattggatgataatctgccaattgttctctcttccttataaaataagataaatcacctaatgaacaataatccattattaaatggaaatattgatcagttttaacacaatctaacaatgaaacaatatgtggatttttcaaatttcttaatattttaatttcaattccaagattagttacaagtttttcactcttcaatcgattacggaaaacacttttaattgcaacagttttattattattatttaaatcattacctttataaacatttgcaaatgagcccctaccaatttccataccgattcggaaatgtgaaataactgatccgggaccttcggagacattggaaattgatttgtgattatttttagttgtgtttgacatgttcctagttgtctctaagtgtaataaccaatgtaaaacaaaagaaaacagtaataactcatagaatacgccccttacaacaggagcataaacaaggtcatcacagtaaaagtcttaaattgtgacacatcataataaataataataatatttgccctcgcgataagaaaatgagttttttcctttttcggtatatttaactgataaggatcagatcatcttcaatttcaattcttatctaatgttgatcttttttatgttgttcttcttttcttttctcttctcttcttttggtatggactttcatacttttatgtctactgcttccactctttgttggtgtgtggctcttttaccgcaaatttaccacaattactcaactaaatcagttcacggtttatctccctatctattactcctttggcttttgggtgatacatgtaatttaattggatgtatattaactaatcaattaccatttcaaacttatttatcatgttattttgtattaagtgatatcatattagatttacaatacatatattatcataagaataacatttctaatgatgatgaatttattgaagaattaactaattcttctattgaaatgttatcagaggatggtgcctattatacaacggataatacaatagagaatatatcttcaaacacaacagctttcacaccaatactttctaaaactcaactgattacaactacaactgcattgatctctatttcacctgcatcagctatacccattatatctactcaatcatccgagaagttattgaatactcattatattggacttttatttgcttggttatgtactataatttattgttcatcaagattacctcaattatatcataattatcaaaggaaatctgttgatggagtttcaccacttttattcacatttgcattattggctaatttaacttacgctatttctattcttactacagaattaccattaggtttatcatataaggattttatattgagggaattaccttatttattaggttctttggggacagttttttgtgatttaatgtatttttggcaaagagaattttataaacaaatatagtttaattaattaattaattagttaatatacccaataaataataaatcaatgtaaaaatgtaaattatacaaaaaatacttttagaatccagtaaaataaccaggttgttgaccaaattgttgttgtgccatttgttgttgttgttgttgttgttgttgttgttgttgttgtaatgccagttgatccaatgttaattgactactacttgaagtagatggttgtgttgtaaatccagtttgttgttgtagtggtggttgttgaacttgttgttgataacctgtagccatctgttgttgttgataaccattactcatttgttgttgtgggaatccatttataggttgttgatatcctgtattcatattaggtaattgttgttgatatgatacaccagtttgaaatggattcatagttacttgttgttgttgatttggatcaatatattgttgtccattaccatcaacataataaatattaccagttgttggatcaacatattgataaatttgttcagatttattaatatttgaattttccttagttgaatttcgaatatcatcatctaaccaattaaattcacctgctttggtagaatcaaatattgcacctgttgattgtttacgttgtggtaatgatggattagaagtattggaagtgccgttattattattattattattattattattattattaaatggtgatggttttttacctgctttttcaattaatgcaactgcttcattaatattaccacgagtaattactaatgcttcaacattcaaatcttcatcctcatatcccatatcaaatttcatttttctactttgatcaccatatctacgatattcggcaccaattggctttctgaaaactattttatttggccttgaagaattagatgatgttgataaattagatgatgaatatctaccattactactcgaaccacgagataaataaggtcttgaattatattcaaattcacgactattacctcttctactactactgtactcataatcatcattatcatcatcataattattatcataataacttctagctgtacctgttctttccaatcctcttctcattgatcttgtcattttactgacatctttataatctgatgaactattgacatatgatttatttttactaatattattactactaccaccaaatcctaatgcattagataatctacgaccagaacttggtcttgaatttgtagatgatttatcatacccccaatcatcagttctatcaccccaatcatcatccaaattataatctttatctaaaactgcaccatatttatatttaccagtatatttattccttaaccacattgttaaagaatctttatcatcagcatcgaatgggaatggaatttgcttttcattccaaaattgattattacgtttattaccaattttacctaatattgataattcatgatgactccattcttccattgataatgatttaactcttgaaatatctgatccaagtgaacgatgtgcacttgcacaattaccacaaaggaacacacctaaattccatgatgcccatgttggattatgtgccttacattcaccacatttatttctattaactggagaattcaataattctaataatctttgttcctgttgattctgtttagccattgtcaattgattgcagtatcaagtaaaagaaaacgtcctataagagaaaactgcaatgatgaaatcatcaagttaaaactgaaaacttagcccacgctatttccatatttttttaatcactcagccgagttctattaataatggagtctttcaatgagttactttactttactttttctgttttgtttataaaagttaatgtagacggtataaatatatggtatataatatgtgtaatgtgtagtatatatgcttgaaaaggtggtataatttagtaataatgataatgataataatcaatcaaattaacgataatgaggtttcctcggaggttcaatattaagtccagtaaaccatcttggaacacaagacataaacttccaactaaattcatttgtatgagcacatctacaattaagttcatttcttgactgtttttctcttggacaattaccaattcttccatgataataacctgtattatcaaaatatttaatttgatcaggttttaataaataacttacagcaattgaatgaattggtgcatccccccatctttcataaaaaaaattcccagtttcatctaatgcttggaaataaccttcatatattggatctctgaaaaaatttaaatttgcaatttcaaaatttgaccaataatgacataaattataattcccacgaattgaagttttagatccataatcagtttcaataaatcctaatgaattattatcaggatttttaatatatttttcaccatcttgaattgataaattccaagaaggtaaattttcaaaataatcacgacttgttttccataattttctaatagttttcttatcttcacccattgcaatgataaatccataagttttattttcattaatcatagtttcaaacatatcatcaggtaaatcacaagtaaatctaacatcaggttcaactctccaataccaattaaatttttctaaagcttttaatttatagaaaaatcctgaattaaatctacacatttgtctatatgataaattatcaccatataaaactttattctctttcatcatttcaaattgatttttcattaaaactttatcaattgaatcaggtacattccaatattcttttggtattgttgtgaaaattgcatcaccactaactaataaagatattgaatctttaaattcttttgtaaatggaacatcatttgcgaaaacccatggataatgatgatttttattaaaccttttctcaactgtatgaatacttttagcaataccatttaaatcagaatttctacaaattgtgaaaaatgttgcatctttaacagttgggaaagtaccattaaaggaatccaaacttttcaaacgtatttcaatatcatcatccttaacaatacttgaatttgaattattatttttataataattaaaatttatacttggtaataaatttgttgtatcaaccataaatgaaaatgtaataagtatacatactgataaaaatgatattatcaccaagagagacaatgtacgatacgaaactctattaatacgcatattctgtatttataagttcctcataaaatgcagtactctcaatcatagaagatgtatcaaaaaggaacctttcacaattgaagatctgtcaggaccttcactatttttacctgtatacacagtgtataaaaccgttactttaagggaacggaagcaggaattgccgatagaatcagtttaaaacttttaagccccaatcgacgcgtctgcagtgtttagagactacgcgtcgatgggaggcttgtcaatattttcatgaataattttattaaatttttttcactattgcctatttgggtaaaatgtaaacatccttaattatattaccctttatagaaaagtttcaaattatctccagacaatcagacagtcagacagtcatttgatatttgaagatctgaattaaagatctctagagaaaaatttggtttagatattaattaattaatatttgatcatgcaagggtttccaaatactcttttcatatttgtatagtattttcatataacatttcttttaattatacgtggttctaactatggctttccataagctatactgccagatcattctaatactggcactattcacagtgtcaacccatgcaaatatgtctcaaaaaactttttatgattataataatagaactttatacatccatttaaatgataataatagttcaattaataataatacattatttaaaatacctttcaattcacattttacttcaggtttagatttatcttcttcaattataacacccccacctaataatttatgtgagatagtttatacttctgcttccttatatgcattttgtccaaataacaattacctgtttctatatcaatatactcatagttcaaatagttgggaatttataaatgttgatcttaacctaccttattacttagattctaattacctctacacaaattcagataataatgcaatttatattttttcaggattaatgacaaacagcaccaaaatttccaatcaaatgttaagattagatttaaatactttacaaatatccaatgcatcttcaagaattcaacctcaacctttctataaatcttccaccgttcaaataaatcaaaatactcaagctttattaggtggtatatcatctgataattcattagttagtatgatggaaattccattatggcaatataatagttgggctgagagaccttcagtttcttcattatcgagaggtattgattcaagaataaattctcttatattacctatttttgatgaatcaaatttatactttttaaataatagtatttcatcatttgaagtttcatcccttttgttattaggtggtaaagatctaaatgataaaaatgtatatcctcaaattgcatcattaaatatttcaactaatatttggaaatggaatgataaaactaattccttattagttgctaataataatattaataatggtagtgttacacttaatataagttcaatcattggtgctgcaacaatttatgatgctttgttaacaatctcaaataatgataagaatgaatatattttaaacatttataatgcaacaacatatgaatatttaaaagatattgattattcatcattgagtaaattacgttcaccaatgataattgttcataataataaaaatttgattatagcattatcaattattattccaattttattaataataattattacatgtcttttactctggctttacaaaaaatataagataaagaaagaaattgaaatgaatgaaagagaaattaaagaaattgtagatttttatgaaaatcaacataaacaaaattcaaatattacattttcatcattagattcagattataaatcttctgataatgaaaattataattatttttataatgatattaaaataaatgattataatggtgataatgataatggtgacaatttatcaattgattcatggaaacgtaaaagaagagaatttgaaaatcaatatcaatataaatacaataataatggtaatgataacaactttccaaattcaaaacttaacttttcaccgaaaaactttaaccttgtttctaaaactcgttcaaattcattaatgagatcattatcagttgcatcaaatttcattaatgactcattatcaagatctaattcaacaaaatcatcacaaccatttatatcatctaataaaaatatcattcaagataatccatttgaaaatgcagaagtaattgcaagttctgcatcatcaataaattcattaaacttaccacaacaaccaccacctgcagttccgaaacattcaagtttactctttactccaaaaaataattctcataatagtaattcattattaaattatatacctgaaaattattcagttagtacattccattcacagacacttggttcaataccattactagttaatttacctcaacaacaatatatgaataaattaaataaaagaccatcaatttgttcaatttcttcatatgatgataatcaagtttcagtttatccaaattcatgtaattcacttacatctagttcaattaataaatctagaagtagatctccaagtaggtcactaagccgatcaccatcaagatcacctaataaaatatcacataaaacttttggtagaatttcaaatagatcatcaatcagatcatctaatgattatgcaaatccatttaggaattcagaaattaatacaatatcagaaaatgattatgattatgatgaacaagttgatgaacatgatgatcaaggctctataacggatgatgaaaatcttgatgttcaagttttagttggttgtaaaagaagatctaaattgaaagttgttaatcccgatgcgcaaagtaatcatgataatgaagatagcaaatcattagatattgtcgatatgaatgttgatgaaaaaaatagatgtacaagtacaggaagtcaagaaagtaatgatagtttaagaaaaagaaatgtaagtggtgaaaaggtaaaggatgatgagtaatagtaaacttttataaactgtataataaataagttgtgtaattttaaattgatgttaatactaataattatattgaacaattttttttttattgaattaagtaaagacaagatataaatggatataaatgaatgtgtgaatcatacataataaaagatcagatcaatcaataaaccacaccgaatgaagattctcttgatttttgaattaaataagtatcagcaagtactaaagctgccattgcttcaacaattggaatagctcttggaacaacatttggatcatgtctacctttagaatttaatacaccatctttaccatcataagttgaagtattttgaccttgacaaatagttgcaggtgatttaaatggaactgaaaaataaatattttcaccatttgatataccaccttgaataccaccactattatttgttatagtacctaatctatcacctttttgaataaatggatcattatgttttgaacctggaattttagtaccttcaaaacctgaaccaatttcaaaacctttagatgcaggaattgataacattgcatgagctaataatgcctctaatttatcaaaagctggttcacctaaaccaattggtacatttctaataacacatgtaacaacaccaccaattgaatcatgttgatctctataattttcaacaattttagtcatttcttcagccttttcaggaattggacatctaattggacctgatgcatcaacttgttctcttgttatattttgtaataattccataaattcattattttgacatgatctattaatttcacattcaccaactgatgaaacaaatgcaacaatttcaacatcattaacttgttttagaaatttttcagcaattgcacctgctgcaacacgtccaatagtttctcttgcacttgaacgtccaccaccacttgatgctttaataccatatttaacttgataagtataatcagcatgtgaaggtcttggataattatccatatcagaataatcatgaggtctttgatctttatttttaatgaccattgcaattggagtacctaaagttttaccaaattctgtaccactttgaatttcaactaaatccttttcattacgtggagttgttaattttgattgacctggacgacgacgtgtaagttgaggttgaatatcttcctcagttaatgacatatttggtggaacaccatcaacaatacatccaacagatttacagtgggattccccataggttgtgacacggaaaacagaaccgaaagtagacataatgtgcttgttctaagaggatattccagaaggaagaggtagtgaaagtggtgaagattttgacagtgtcggaatttttcaccgtgacggatgaaaaatttgtgagtcatcaatgtttgaagactttatttcttgctctttgctattaaaatacttatacttatacaatacacaaactagtatacaccggaccatgtccaaactcttaccatttcaccctgtatctctacatcttccactagaacattactatttttctcaatagttcgtacagcctttgcccaaactttttgtcgactatttctcggaagtgtgtgtagttgaggtaggtagaaatcacgtaattgaatcttggcaatatatttaacaccattagtaatgttcttcctctgttgttgtagtttagttatactatccttaatgatataacgataacattcattttgacgctgaatctcattgatcttatagaaaatgtatgaaataaatgtcagtaatgacgttattgttagaatgtataatttatatttgagtaaaattgtaatgataaatttttttatacgacatttgaatggtactttattcatagaaatagaccttattaactcattattgaattttatatcagttctagttgttaaaactaacttaactttattccaaaaataattatagttttcatcatttatatcaataagtaatttttgattgattatttcaataatttgatcccatttcaatccaacttcttcatctgatccctcaccacatttataattaccatttcgttcacttaaataatcacctactgatttaactattttatttattcttttgatcttagttgaatctaatttacatgtggcatatgttggaattaaacttgaaagatagaaaaaccctttagttaatgtataatctggtaaacattcaattttagaattttcagaacaaattgcatgaggtggacaattgatacattttaaatgtaaatttaacatgtttttaagtaaattaggtggagtttccttttcatgtccacaaaatccaacttgtattctctcttgtctgtaaataacaaaaatgaatgatataagtaagactgttaaccaagtgaagataatcttcaggtattggaatttatagtacttaaatttttcataattgtttaacttattaagctctttatcagactcaatttcaattcttgaattttcaatttgaaattcattttgtaattttgtcaataattcagaatcatcttcaaatgttatattatttaaagaagttgaaaatgatgtcgatgaatttatattttctgttgattctaattcattagttgttgtattaccattagttattaatttaatatcatccttaatttcattcctcaatgaattaatttgttcaagtttgactttgatatctttttcaactgtgatgttatttataggacctgttaagacttgtggtggcggtaaaggtgatactggtggaggtgatacggatggttcatctctatgtgtgataattgtatcatttgtatcattaatatgattcagtatatcattatcttcattaaaagtactattagctattggattagttgatggttgcttatatttatatttatgatcatctggaggtggataatctacagtattagttatttgatgttgtttttgatgatcaatatcattatcattatcagttttctcaaatgtggaatctagttttaattcactatttctatcaaatagattagtatttttaattttaataggttttttgctttcactaattgaaggcaaacgcttccttttaattctcttttgtaaaacatttgaataagttgtatcatcattagtcatagatatgtcatcatgttttctcttttgaccaattaccagtccctctgtgggatgtaaattatttagggaatttccatcattatcatcatcttcattgtcaatattgttactattgtcacttggtggtaatataagtgatttccataatttttcatcattattgctagtagtagtatttttaggtttgttttccggtattggtattggtatcgaatcttttggatcttcaattggttcggatttaaccctaacaggagtatttgatgtatctttactattattattcctttcagttaatttgggaactagttttgaattaaacaatttaattaaatcaactttcctatcctttgtagtccattgaatatcaaattgagttaataattttcttaaatctactacacgtagagtagatggattaaaattctcatctgtatagttcattacaaatatgtgtgttatatactaaaagagagaatgataaaaaaaaattggtattatataatgaccatgtagaatacttcttgtaagtatagtactatactctaacgatattagagagagttagtacaggataatgatacctgtaacatcctgaattcatcaatcattttgaaatgtaaataaaaatcatgtaatggtaatattgtattacgtaatattagacatgttattataataaactctttagtagttacaactgtttataagaaagcaataattggtagctattgaaataataaacttagttgaattatatatttagtatttaattgtatgaaaaaaataaagagtgtttgtaaaaaaagagaggaagtattatactcaaactttcagagtttctccaaaagtagcaaagtaacctttaggcaatgttaacctttcacctttcttatacgacttgatataattatcagcctcttcaagcatatagtcaatttctggtaaattatctttaatttgtttcttccattcatatgaatcatatttttgtaacttatcaatcataaacctagccccgtgttgaattggatttgcaagtgaacaaccatttttaaaattaactagtttaattgtacattttttttttctttcacttttgataaaatttttgaaagttgtttcatcattgatttgttaattaaatcatttcctgtaaataaagtagagcaatcactttcatagaggcataaaaataaatgccaaattgaaacaggatagttggaaaaatatctttcaacgtctgaaaacgtatcggggtcaagtttttctcttaaaatgtctttaattaatagaaatttttcaaaagtgcattcactatgttgtgaagatgattttgtaaaagaaattaaatattcaaccatatcagaaccaaatttgataactgatttatctgcagctaatgcaaaatttatcttatgtgataatacgactgtatctcagtaaagtatatcatcattttgagtggactcaatcattttattaagttgttttgtaccgcagaaaattcttggcccaacatcaacaatgaaaaatctcatgctgtaaccaaatgatgtccaagcacttttgtttaaggtaaaatgtgaatatttagcattgattaatttaagtgcatcatccataaaatatgtttctagacttcccaatgaagaagaggatgatagagaaggtgatgataattttatatcttctacacattcttctagggttggtccaaaaataaaagctttagcaaattcctcctttttcaaggatttaatttcaggattttcagtcattaaaggaactaatttctggaaaaacaataaaattaatttagtaataaggtcaggttttaaatctttgaaatggattttttgacaagtaatacgatttccagtgagaaaatttctatcataattataatcatcgtcttcctcgtcaacaccattactgttttcattgtagtaattaaatagtttatctgattctaattttagaattaattcagatttaaataatttaattaaatcagacttttcatttttatgatggtatgaaatatcatgcattgctaataattattgtaattcagctaagttcaaagttgatggatcaaaatgagtgtctgtttaactcattggaaattgttactctgtgaataaaataagaagaaagtaagaaaaaagtaagaaaaaagtaagaagaaagtaaaatagttgtctacgaaatttgagtatcccatgctttataaacaaacaaacaatcaatcaaagcagagataaatactagtattataagaaatgtgacctgtcatattgctaccatctcttatgtaaataaagcaattctcaaagaataagtcgctaccaaaatagaatcagtctggctatgtatttaatatttagaaaaaaaaaagaaagagaaagtagtaataaataaagaaataaagttatttaaaggttaacgcatatttaatgttttcccacaggtagcaaaataaccatcggtaaatgttaatctttcgccatttttatgtgatttaatgtatttatttgcctcttcaagcataaagtcagcacttggtactattcttgcttcttttggacttaatgtacgatcttgtaatctgtgtatgatatatttagcaccatgttggattggattcaaaagtaaaccaccatttttaaaattaactacattaagtttacaatcttttccttttaataatgataaagcatatgaaagatttttaagtgaagttttattaattgaatcatttcctgtaaaaattgttgaacaatcagttttattaagacataaaagtaaatgccagaaagcattaggttgtttggataaacatattttaatttttgaaaaagttgtagaattattgactttttccatcaataatttttgaaaatcttctaaaaattctggagtacttggactgtattgtaattttggtgatgatctagtgaaagaaaacaaatgttcatccatagaggagcctagattaaaaactgatttgtctgctactatggcaatacttttactttcggatattaaaacagtatcccaataaatgatattttctggtggaattgattcaattttttcaatcatagcatcgatattattgaatattcttggactaatatttgaaacaaataatctcatattaatgataaagtcttcccaagattttttacttgctgtgaatatatttttattaaaatttaataatttgattgcatctttaatgaaagtattagaaagaaattgttttaaaaatctttgtttggttaaagattttaaatattcaaaatcatcgtctttatttaataatctaatatgatattgaaagaataaatcaactaatttagcaacatctttatgggataaatcacagagatgtatttttgcattgttgtttttgaaaagcatgagtttatcataataatcatcatcactatcatcatcgctactattatgaacaccatgtttttgaaaataattattaaaagcttgtgactttagtattggaagtaatctattttcaaataggtcaagcaaatcttgtttgtcataactggaattaaattcaatattgtatacagttaataattcctttaatacaggttcagaaaatgaatcgtatgtaatattattgttattcataatagacaaaggttattaaaagaagagtgaaattaaagacacatacaatacaaacacattaccaccacttgaatttatagaaagataataaacaaagagataatacactcttattacaagataatattacctatcatactgctaccaattaatcatgtaaataattacataatcaaacattacataatcaaccattacgtaatacaacattacataatcaaagaaaaaaactgaaatgattccaatacaatacgtaataaaaaagaaaattaaaaacctcagaaaagaaaaataaaatcataccattaaattaatccgataagatcataattatccgaaatctccttacaaattcggatcagcttatcccacgcaacatgacagtgtctctattttataatgtttactatatttgactttattttatcggtgtcctcttagcactgtctcacaattataaatagttacccatatcccatcatttctctcatttcaagtttttgttctattttatatctcttctttctacatccactcaattgatcaattcttataatcaattagtatattattaaacaacaacaacaacaaaaaaaacaatcttactctattatgtcacaaatttctttaggtacttatatctttgaaaaagttaaagaagctggtgttcattcaattttcggtgtccctggtgattttaatttagctttacttgatcatattaaggaagttaaagatttaagatgggttggtaatgcaaatgaattaaatgcaggttatgaagctgatggttattcaagaattaatggtttcgctgcattagttacaactttcggtgtcggtgaattatctgctgttaatgcagttgctggtgcatttgctgaacatgtcccattaattcatattgttggtatgccttcacaatctgctgaaaaggctaaattattattacatcatactttaggtgataaaacttttgatgatttcgttaaaatgtcaagtagaattagtattaaattaaaggttattgaagatttagaaaaagctccattacaaattaatgatttaattgaaactgcttataagactaaacgtccagtttatttaggtttaccaagtaatttctcagatgctttaattcctgcaagtttagttgatgaattaaaattaaatattaaccttgatgataatgatgaagaaactgaagatgaatttgttgataatgtcttagattcaattaaatctgctaagaaaccaattattttagttgatgcttgtgcttctcgtcatgctgcaactcatgaagttgaaagattagctaaattaactaatttccctgttttcactactccaatgggtaaaggttctttcaatgaagatagtgatgaatattatggtttatatgttggtgcattatctaaacctgatgttaaagaattagttgaatcaactgatttagttctttccattggtggtttattatctgattttaatactggttctttctcttataaatattcaactaaaaatgttgttgaattccattctaattattgtaaatttaagagagcaacttatgatgctttaaagatgaatggtgcattaaagaaaattaatgctgctttacaaaatgaaaaattaacttataaatcattacctgttccagcttctaaatttgattatcaaactgcaaaggaagttccaaatggtaaattaactcatgattatctttggaagagaatttcttatttcttaaatcaagatgatattattgtttctgaaactggtacttcatcattcggtgctttaggtactcatttaccaaaaaatgcaaaggcaatttcacaagttttatggggttcaattggttttgcattacctgctgcaattggtgctaatttcgcagttgatgatattaaaacttttgataattcaaaattcgatagtagagttgcattatttattggtgatggttcattacaattaactgttcaagcaatttcagatgcttgtagatggaatattaaaccttaccttttcttcttaaataataatggttatacaattgaaaaattaattcatggtccaactgaagaatataataatattcaaccttgggatcatcaaaagattttagaattatttgcaaataatgctgaacatgaaagtttagttgtctcatcttgtaaagaattagatgatttattaaaggatgaagcttttaataaggcagataaaattagagttattgaattaatgttagatgaatttgatgctccagaaattcttaaattacaagcaaaattatctgatgaaattaataaacaataattgaaatgatttaataccattttttttacttttctgtataactcctttatattaattataattaacgaacaatatttaataacttataaaaagtgtactatttaatctaataattaatctatttaaaataatccttcaatttcaccatcatcattaacttcaacattcataaaacctgcatgagtacttaaacctggaattgtcataattttatcagctaatgcatataaataacctgcacctgcactaattctaacttctctaattgggaatataaatccagttggaacaccctttaattttgcatcatgacttaaagaatattgagttttagcaatacaaacaggtaatttaccaaatccttgactttcatattggaaaatttgtttctttgctaattcacttaattcaatatcttttgctccatacattttagttgcaattatacgtaatctatcctctaatgaaccatttaaatcataaaggaaatttgcaggtttatcttcatctaatggtttttcctttgttgctctaacaactgccttagctaaattaattgcacctaaaccacctttggaccaatgatcactttcaacagcatcaaatgcaccatgcttttaatgcttcctctctaatagttgaaatttcattatctgtatcagttgcaaatttattaattgcaacaacaactggagctccataactaattgcattttcaatttgtttacgtaaattactacttgcaccatttttaactaattgaatattttcagttatatattcatcaggtaaaatttgacctggtttaacatcaggtgcaccaccatgtaattttaatgctcttgtagttgcaactaaaacaactaacatttggttttaaaccacttgaacgacatttaatattataaaatctttcaccacccattgtaaaatcaaaacctgcctcagtaacaacaaaacctttttcaaatgaatcatcattaatactttcttttggtgtaccaactaattttaatgcaagtttatcagcaataactgatgatgcaccaattgaaatatttgcaaatggacctgcatgaacgaaaactggtgtaccttctaaagtttgcattaaatttggtttaattgtatcctttaataaagcagtaattgcacctgcacaactaatatcttcacaagtaattggttcaccatccatatttgatccaataacaattttaccaactctttctcttaaatcttttaaatcttttgataatgctaaaattgccataatttcacttgcaacagttatatcaaaaccagtttgacgtgtaatacctttttcagttggtgcttgaccaattgtaatacctcttaaaaatctatcattaacatcaacaactcttttaattgtaattgaatctggattaatatttaatttagcaaattttttaatttcttcaattgttaaatcatcaggatttgttttattaatacctaatttctccaatcttttcaacattgaaattgtaaattttctaataccatttttctttggaactaatcttttataaaatgcatcatccttttgagttttttcatggaaaattctagtatcaattgcagctgctaataaattattagcaatactaattgaatgaatatcaccagttaaatgtaaattaaattcatccattggaataacttgtgcataaccaccacctgctgcaccacctttaacaccaaaagttggacccattgaaggttgtctaacattagcaattgcaggtatatttaaatgagcacctaaagcttgaactaaacccattgtagttgttgatttaccttcacctaaatggagttggtgtaatacctgcaactaaaacataattaccattattacgtttattttttaaattttcataaacattaagtgatactttacctttataatgaccaaaattttcaaaatctttataattaatacctaattcattagcaacttcattaattaatttaggagtttgatttcttgaaatttgaatatctgaaggaacatggatctaataaatctaattttaatggtttaatatttaatggtttattaagatgtttaaattgatttaatgcagccttgtaaacattttcaattaacattgcaacagtcattggaccaaccccaccggggacaggtgttaaaaatttagcattttctttaactgattggaaatcaacatcaccaactaattttgaacctgattttttagttgaatcaggtaaataattaataccaacatcaattacaattgcatcctttttaatccaatcacctttaacaaaatttggtttaccaattgctgcaataataatatcagcattttgagataattttattaatatttgaagttttagaatgacaaattgtaactgtacaattttcatttttcaacattgttgcaacatggtgaaccaactatatctgatctaccaataacaacagcatttttaccttccaaaggtatacctgtttctttaagtaattttatacaaccatttggtgtacatggaaggaaatgaggggaaccattttttttagataattcaccaatattaaatctatgaaatccatcaacatctttaattggtaatacagaattagttattttaacttcatctaaatgaggaggtaaaggtaattgaatgaagtataccattaactgaaggatctaaatttaaatcattaattatattaagtaaatttaattcatttgttgattcctctaatttaataatttgacaattaatatttgaatttttacttgcatttaatttcatacgaacataagcagaggaatctggtctattaccaatttgaataattgataattttggttgaaaatctgggaaaatttgttgtttaggataggattttagatgagatattagatttaattgaatttgcaatatctttacccttaaggatagttgcttgataagtaagtgatgaagatgagaaatttttataaagaactgaattagttcttaaaatactataagagttattaactctaatagatttagttgattgtctaagcattttgattaatgaaaagatgtatataaaagggttagcttgttgaatggaaaaaaatttactaaatgtgaaaaatgtgccaaaaaaaattttaaaatggtgatgaaaatttggaaataaaattaattaatcacttttaaaaatacaggtgcatgtgctaaatatttaaataagaatgataacaagatataagattgataataactgtgaagaaggtaataattgatgataattattattattattattatagataatagattagagtctattaagagatgattacaaaggagaagtcaattatattatcaagagtgacttctgcaggaaagtaagtgacttctacaatgttttgacttctctatatctttaataaaaatattgacttctctttattacgtaattgtattatattacgtaatctattttattacgtaattgtattatattacgtaatctattttattacgtaattgtattatatttacaagctgtattaaagtattaaacattaattatatttaacttaaggaatcattttctagctgaacctcttggtctatccttaaatttattcttattttcatgtttaccctttctagttttaaatccacccttagataaaaccccccatggtgacattgatggtttattagatttagatttacctctaccaccacctaatggatgatcacatgtattcattgcaacacctctaactgttggtctaatacctttatgtctatttctacctgctttacctaaactttcattatgatgtgcactatttgatgtaatacctaatgttgcacatgcctcaattgaaacatatctttgttcacctgattgtaattgaataattgctttaccttcaattggtaatttactaacaattctaccatatgcacctgcagctctacaatattttgcattaccattcttaaattctccaatattatgaataattgtaccaactgaaatcattgaaattggtaaacaattcccctttttagatattttaacatttaataatgcaggatcaattttacctcccatttcttttaaaaatctattaggaataccactacggaaactttcaacttcatctcctggtctcataccttcacatgcaattatatatgataattcaccactttcattatgttttaataatgcaatatgtgaagttctattggggtcatattcaattctcaaaactgtttgaggtccaggtttatttctcatataatcaataattctaattcttctttgaacaccaccaccttgatgtctaacaacaattctacctgtattatttctaccagattttgcaactttagtaattgttaatggtttataaggtttacccttccaaagataaggataaattggtttcctccaccatctaatacctggtgatgttggtttaacttttttaagttgaactttctccttctctaattccatttgtcttctattaagttcatcttgtttctctaattctgttagtcctgagagggcattagtagtaggtatagttgaagctaatctataattaaagaaggaagtaaatcctcctactgttctagatttagatatataattcttaaacatctagcttgctctatagtatattctccaacaagtattgtccaatccttatacttactctacttatatattcatgtcgacaaagtaaaactgaaaaatttaaattaaataacagataaaatcaaagaagaaaagagacgatcgacccaaaccaatcgacgcaccgacccctcctaataataaataatatccaatcaacgtcttggaaatcttcacgctctttgaaatttcagcttttgccattttactttgtatagagggtgttattagaggatacttggtataatagatatcttaatttctatcctttatacagacaacacaatggcttctcgtcaatttatcagatctttagctactgcaactgctaatattaaaccacctgttcaacttttcggtttagatggtacttatgcaactgcacttttcacagctgctgcaaaggattcaaatgttgaaaaaacttttaattcagtttcaaaattaaatgaaacaattgcaaaagatattaaattaaataatattttatcaaatccttcattatctcttgattcaagaaatgaaattattaaaactgtttcatcaactttaaaattagaaccaattgttacaaatttattaaatgttttatctgaaaataatagattagaattattcccttcaattgcaaaacaattttcagttttaaattctgctttcaatggtgtagttgaagctaatgttatctctgcaaaacctttagattcaaaaactattcaaagattatcaaaggcaattcaatcttcaaaattcgttggtgcaaataaatcacttaaaattactaatgaagttaaacctgaaattttaggtggtttaatcgttgaagttggtgataatactgttgatttatcagttaatgctaaagttaccaaatttaataaaattttaactgaatctatttaattagaataggttttaatactacattctatatttatttatttatttatttatattgatatatgatcttactttaagtatagttacatattttaaaacacatttatgataatatatgcctttatccaataatatccatagtatactcgctacgtccatttttaaagtaggatatttatttattagtataccaccttcttttcttttccttttgaattaacttctcttcaatgtaccctatcttacctacttaaatgacaggattacatcattccttaaactcgttatccttaaatgatgatattattgatataactgaacaatttttccaaattgcaagtaaattacaatattctaaaatttcaaaggcaaatgaattttcacttttacatggtactcatgcattagaaatacttaatccaagattagatacttatcttttatctaaaactgattatgatctttcaaaggaactttcattattagatacagttcaaataataattaatcaatttaaatcaatttcttgttggttaacacaaaatattagtttaccctgtacaattttatcaaatgaatatattttacaaattttaatcaattatactcaaaatggtgaacttaataccatatatgatattataacttcatcaggttcaaaatttaatattattatttataaattttcaataattttaatacaatttgttaaattaatacttaatttagcattaaaatcacaaatttatgaagatgaagatttaaatacaagtacaatgaatcttaattggtttaataatatgactaataatgaaattttcaaaaattctatgatatctaataatttttggaatgaattatataatgaatcaccggaggatgttgaatatttagattttattaaaaattctttccaaattttacaatctttaattagtattgaatcaatatttcaatggaatataccattatttaaacttaatgaatctaaagagtttaatactaaatttcaaaataaacttacacagttaaataatacaataattaaattgaaggaaatgcaaaatattaaattggaatcaactaacttaccaaatggttgctttaatttaaattctcaaatttcattggataatcaagcacctcctaaacaattacatatttttgaacttgattggaatcaatgtattttaagttttatttcattatttgaagatatcgggaatattttacagactttaaaatcgaaaaattcattagaatttaaggaatggtttaattttttggagaataaacgtaataattcagatatttatgaaattaatggattacatataattgcaagaataattttttataattttttcaataataattcaattaattatgaaaatattcaactttcaacaaataatttattaaatattgaaaattatacatttatggattttttttatcaatatttaaaagaaataactcttaaaaattcaaaaattgatttacaatatagtaataaaggctctagtaatgaaattactcaacaattagattattattttgaaaatttatcattattatttaaagaagtactttttttaccatcattaaatccatcaagacaaagacaatttaaatgtaaagaattaaaatattggaatttaagacaaaatgaagtacttaatttagaagaatattttaaatcaattggattttataataaatttgataaaaattatccattaacgtttacaattatattatttaaattacaatgtattagtgaaattattttgaaaagtattgaattacaattatttaaagatattagagaatatttatcagtttattatcaattaacatcaattagttatcaattaaatatccattatcaaaacttaattagtatggttaaattaacaaataattcaaatatgatttatttaacttatttaaagaataaaaataatttaatttatcaattatcaattatgaagtctaaacatttggaaattttaaccatattaggatttaataaattacctaaaaatttaattaaaaacaataaggttaaaattaatgaagaattattatttaatttacaatggaaacaatttaataatataacagaacctgaaatgttaaaatatggagattttaaaaataaaatagatgaaattgaaaaagaatataaggttgataattataattatattaaaactattaatgaagatattaataatattaataaagaatttaaattatccaataattttataagaatgataattaaaaaattagattggtttaaagaattagaggcagttaaaattgaagaaattgatttacttaatgaagaaatgattaaaagtaataaagatattaaatcattaatagaagttatggattgtattgaagagtatgatgtgattattgaaacacatactagacattgttatttcccaggatttaaaatagtgaaaaatagtatagaatagaataagattatagatattatagattaaaattaatagagaattatgaatgaatatgataatgatatagcagagtatattggacggtggctagagtgatagcatccgctaagaaagtttgaataaacttaccaattacttgtagtatcatatatcaataattgtagttattaaatgtagtataaatagcagccttatattaatattaacatcagggtttggtgtcacgtgagaggggtgagggttgttcaagtgaagggactgtgtaaataataagcacacattacccttttgggaagtttcgcacattttaaaattttctaaattttttcaaatagcagtaggccttattctattattattatagagagttagatactatactgattattatattaaatttttcacttgatttcaatttaattattattttattctatttaccttcctttcatttcaatagacaatcaataagtaaacaatatgcctccaaagtttgatccttctgaagttaaatacctttatttaagagctgttggtggtgaagttggtgcatcatctgcattagcaccaaaaattggtccattaggtttatcaccaaagaaagttggtgaagatattgcaaaggcaaccaaagattttaaaggtattaaagttactgtttgtttaacaattcaaaatagacaagcaactgcatcagttgttccatctgcttcatcattagttattactgcattaaaggaagctccaagagatagaaagaaagataagaatgttaaacataatggtaatattccattagatgaaattttcgaaattgcaagaacaatgagagaaaaatcttttggtaaaactttagcttcagttactaaagaaattttaggtactgcacaatctgttggttgtagagttgataacaaaccacctcatgatattattgaagcaattgatgctggttcaattgatggtatgtattatatgaatttacaaaaattttccactttttcttttttttcagaacaaattactaacattaaaaccccccaacaatattttattttatcacagtcccagaaaactaagttttttatattaataattaaattaataatactaaatataaataaattaaactttgctttttcaaatatgtacaaaattaataaattttccattcataataaacatttctctacgaaaacatataaactatttgtttgtttgctttattactatattatatgatatcatgttctttctctatacttgaaatcatttattattgcaaactaaattaactttgtcaattactcaccttcttattccatgttgttaaattttaatgaacaaccacaattcaatttaattgatttgaaattaattttcaaatagtactttagcttaggttattggatccttgaataatttttcattgaaattatattttgattgttttaggtgaatttgatggtccatttcactggcatacattgtaatattgtagtagtaatgtaggagtagtgtagtataagcctttcttatgatcaattgtagtgattaaattgatcgaccttaaagaattactcgatttcaaaaaaaattgtttttgtttacatttcatcttattatcgttgaatgttatcttttctttgactaatcacatttcatttccttcctatcacccaactatggacattgatacattatttattcaagctgtatctacaattaaaagacttactgaattatctaaattaaatggaattccaagaccttcaattaatgatagattaaatttatttggattatatagtcaatcaacaaagggtgatgtaccaaatattttccttcccaatggtgattcatcaaataattatcaaaaatatagtgcttgggttaaatataaaggattaaataaattacaagctcgtgaaaaatatattaattatttaattgatgtattaaatagaacttatgatattaataatatgaatagtgaagtaaattcattaattaaatcattaattaatgaatatagtaaatttgaaaataataaattatcaaatgttaatgatgggaaagtttcagtattgccaagatctacatcaccagctgcttcattatatagaattgcatcatccggtgttaattcaaatttaattagaccaccatcaagaaatcattcatttgttaaatctagaaaaaatagtgttagtattgaaacagataataatttaaatactgttaatgcagttgatattgttgttaatgatagtattgttagtaaagaaactgctaatacaacagttgatagagatgaatttttgaaatggcaaggtgaaataaataatacattattgaaaatatctacacagttaaataatttacagaataatgatgttaataatgatactaataatagatcattttcaggtatttcattatttaatccattaaatcatataaatgattataaaataaggacaaataaggatagagtatctacatttaaagaaattgatttcaatccaatgaaaaagaaggaagatgataataatcatatattgaaaataatttatatgaaattcaatatgttgattaattatttgaaaaataaagtatttataaagatacgtggaattgattcaattaatgggatatttgataaattagttaaatcttcagtgataatatttatcataggagggttattaaagagattagttggtgtataccttgagcataattataatcaacactattcactcttgcaaaggataagagaatggattggaatagtgtattataataataataaaacagttgagccccgcagatagacgcgactgtggggtttttgaaattttttattagtattagtaatcaaatagagtttatcggacataaactgtacggaggcaattaatattatgatctttaacattacttctttcttttgtaacttcactaaatagacaatcaatacagtaattaactaataccaaagatgcctgttgagaaacttcaaaatcatggagcagtagagaaaccttcaactaaacctggtaggaaaccaattatgagtgaaccaaagaataagagaacagctcaaaatagggcagctcaaagagcttttagggaacgtaaggagaaaagaatgaaagagttggaagatcaagttaaaaaattagaagaggagaaaatgcttattgctaatgaatctgaattattaagattacaagttaaaactttattgaaaagtttaaataaaaatggtggtacgagtggtacgagtggtaatattgatgatatttttaattcacttaataagaaacaattagatttaaataaattgaaaaatgattataatgaaaattataattacatggatgataacgacaatgatattgatgatgattcaagtccttcaacaaatcatgattattcagatgataaaaattcaaatatttcatcaaatatttcatcaaattcaagtgttacatcaaatactccaggttcacttacaagtaatgatgaaccttttaaacaaaattctaaaaattatacttttaatatttgtacacctgaattaatgaataatattaacaataataacaataataatatcaatcttgaattaaagaataaaattaataatgtatcatataaggatgaatataatgaaaaatcattttgtcaagaacttaataaagcatgtggttcaaaatcttgtccaattccaaaatcaaaatcaattgcatcaaattcaccaaatgatttattaaataataataatattaataatttaaataatgatacaaattcaagatcaaattctttcttatttaaatctccattatctggaatgacaccatttagtaattcaagtgaaataacaccaacatttttcaataatgaaattacaaatgataataataataaggagaaagatattagttcattttggaattatgaaaataaagaatttattaatgataaatcaacaacaaataataatgatgaaattaatttattatttaatgaatctgataaaattaaggatgaaactaataaattaattgaaaaaaatccatcagcatttcaattagtttcaactccaacattatttaatgatcaattagattttaatcttgaatatgattttgaaaatgatgcatttgatgatttattacaaaaaacagatgaaagtttatcattaccaaatataattgaagatgaaattaatcttaataatgatatcaataatgatattaataatagtggtgaaggtgaaattgaaaaagtacctgataatacagttgatttaatgaaatgtaatcaaatttgggaaagaattacaacacatccaagatttaccgaacttgatattgataatttatgtgatgaattaaaggaaaaggcaaaatgtagtgaatctggagttgttgttaatggatgtgatgttggtaatttattaaaaaaggcaatgaaaggatgaacaaaaaaatgttaaaattgatgaaattaaacaacatgacgtttatattaaaaaaatggcacttaataatgataaatcaaataatttcttacatggtatgtggtaagttttgtcttaaacgttacatcttttctaattaattaatcaacataattcctaatgcttttctaattcatatttccaactatttaacctgtatttatactttataacatctgaacatattatattcccttaatatgataataataaatactaccgacgcatcgaccgcgacatgggaaaataacaggtgtcgcccctcgaaattttgaaatttgtttactaagagagagtttaagtttaagtgtaggttgagtattggatcattatttcttttcagtaggacagcaacaatggctgatatttatgagattgaagatatagatggggttcgttttaattggaatactttcccagttactcgtttagaggctgaaaatattgcatctcctgttggttgtttatatacaccattattagctagggatgatttaccaattgcaaattatgatccacaagtttgtagaaaatgtagatcaattttaaatgttttctcacaaattgatatgaataataaaatttggaattgtccaatttgtcttagtagaaatcaattaccatctcattatcaaaatatttcagctgataatgtaccaattgaattaatacctcaagcttcaacaattgaatatattttaaatagaagtcaaccacctccacctccaacttatatttatgtaattgatttatgtcaagatttagatgatttaataagtttaaaggaaactttaattaattcattagatttacatcctcctggtacatttattggtttgattactttcgattcagttgttaatgttcatgatttaagttttacagattgttgtaaaaaatatgttttcagtggtaaaagagaattaaaatcttttgaaattcaagatcaattaggtattaaaggtaattcaacaaaatcttggaatcaacaattacaacaaatttcaactcaatttacaaatacaattaataaatttttattaccattggaaaatccaacttcaaaagatttaattattaattcaattaataatttacaaccttctaaatggacaattaaaccaggtcatagagctttaagagttacaggttctgcattaaatattgcttcatcattaattgaagcttcatatactcaatgttcagctaaaattacattatttgcagctggtgcttgtacttttggtccaggtaaaattgttggtagtgaattaaaggaaccacttagatctcataatgatattgaaaaaggttctgcaaaacattataaagatgctgttaaattttataataaattatcaattaaagcaattggttcaaatagagatagtaatgataaatttttcgataattcatcaacttcaattttctcagttgatatatttgcaggttgttatgatcaagttggtatttatgaaatgaaaactttaagtaataaaactggtggtgttttattagttacagattctttccaaacttcaatttttaaaaattctttcttagcaacttttaataaagataatgatggttatccattaacttattttgatggtaaatttgaagttttcacatcaccaaaattaaaagtttcaggtgtaattggtcattgtaaatcattgaaaagaaatggtgataatgtttcagatattcaagttggtgatggtcaaacaaatcaatggcaaatgtgttcaataagtccaaaacatacttatgcagttttctttgatattcaaactgttggatcaattgaacaaaaaaattcttttgtacctgaagtttatattcaatttcaaacaacttatagacatactgatggtacatttagaacaagagttacaacattaaatagattaacttcattaaggggtgaattagcaaattcatttgatcaagaagctgcagcagttttatatgcaagattagttgttcataaattagagaatggtggtgaatattcagatttattaagatggattgataaatcattagttaaattatgttcagcttatggtgattatagtaaaaatgattcatcaagttttagattatcacataaattatcacttttaccacaatttatttatcatttaagaagatcacaatttttacaagttttcaattgttcacctgatgaaactgcattttatcatcatacattattaagagttgatgttagagattcattagttatgattcaaccaactttagttagatttaaagctgatggttcagaacctgaacctgttttattagatagtgcatcattaacacctgatagtgttttattattagatgcatttttctatacagttatttattttggtcatattgcagctgaatggagagatgcaaattattcaagggatgattatccaggtgtttatgaaatgattgatggtgcaaaggaggaagctgcaactttaattgctgatagattcccattaccaagatatgttacatgtgatgaaggtaaatcacaagctcgtttcctttattcaaaattaaatccttcagagaatgattcaaataataatattggtggtggtggtggtcaaatgggtaattttggtggtgattcaaatactgttgttcatactgaggatgtttcattacgtacatttttcacacatttagcaaaattagttgttaatgttgcttaaatagtaaatttttaatttaacaatcattatgtaaatattaattataattataacattacctttttgtattttatcttttcccatctttctcccaatttccattatataattttttaaaaagaattatttagaataaaagtatctgttaattaataagcaaagaatttataaagtagtgaaaagctaaaaaagttaaaaatatgttaaaatgaactccaattccaactattgggtatgtttgtaatactttcctttctattattattattattattatcattttcttcattttcaagtaaactatgataatctgttaatttaccttcataatcttcatttgaatctaaaaattttaaccattgattataacaaattggacaaactttacaatatttactatagttatttgaaatttcattaattgaattattatttgtttttgatgaattaattgttgaatgagttttataagtttcaattgacataattggtgataggttatttaagttattattactattattattattattataaggtctctcaaaatttgcaagtaaatttaaatttgcaaaattatttaaacaatttgaacaaaaaattccaccacaatgtctacaatgatgtcttcttgtaaatattgtaaataatttatcacaaaattcacaatttttacattcatcatttaatttccaatgattatgtgatggttcaatatttttatttttattcttatttaaattcttataataatttgaataatcaattgttgaattagtttcagatgttgaagttgatgttaatggtggtgttattaatgattcattaatattatgataaatttcattctctttcttattgattaattgatttattaattgattatgaattttacttaatttaggtgatttggtgaaatcactttgattagttataattgtggaagattcagttaatgattccattgaagaatcttttttattattattgctactactattattttcaatttgcttttgaatttcaaatgttttatcttcaattggtcttaatacaggcggtacataattatctaataatctcctaggttcttcaatttgtcttacaggtttagttaaatcatccttaataaattttcctctttctatcggtttagataatgaatttgaatgatttttttctatttggtgatttatatgtataattactataattggaattaaataatgatgattcggtattggtaatgatatttgtattatgatgtgaatccatgctaccagggtttaatgatatatcatcataattattatcatcagttattgataatttccttaatttttgtgataaatcataggaagcaggtttataagaagatagaggtacttgagataagggcttttccgtgctttcctcttccaggctatctaaagtattaaaggaagaagattttgaatttctatttgaatttgaatttgaatttgaatttgaatttgtatgtgagttaaaatttgtattaaacatagcaggagcagaagttttcctttgcatattagttggtgaatctttattattattattattattattattattcattaatgaaacaattgacattcttggagctctaattttttcatcataattatattcaaaagataaatcatttaatatattatcaggtaattcatcctttgttttcagaatacctttatattttgaataaaatttcgaatgatcaatatctttattaattgaatcacatttttgaggaggatatttattaatacaagaaatttgtgaagatttcctttgaattgtattattacgagaaagttgacgtttattaaatgaaaatcttcttgaactattagttatttgagaatttggtgatgaagaaatttcgatattttctgttttaatagagggtggttgttgtggaatatcatttggataatttgagttatttggtgaaatatttgaagaagattgtgatggtgattgtgatggtgatagtgatagttgattattattgactttattaatttgagcaactgtattatcagttatattatcataattttgattattattagaagtattagattctaacattaatgcagatgatggagttaaaggtttgatatttttaatagaatttttaactttatttgaagaagaagagttatgagaattagaattagaattagaaagttgatgaagatgatgaagagtaattagttagtaaattactaacagaataatgaatattctcggtattggcagataatgagatagcaggtaataataaagtggagttagtattatcaatattagaattcagtattattattagacttattattcagtatcagtaattgtaatattatgcagttgttttagcattgaaatttgttatacttaatgatactataatgatactattactataataacattcacttagtaataaattgtgtgtgtataaataataaagttaaataaattaaattaaactatagaataatcgatgagttgataatatgatgatgatctagagataattatccttctatctatctatctacatgccagatgaataaaaagtaaagataagatcgatgatataataatataataacatagctgtaaattgattggtccgattgcttatctatctctattatctatctccattattctattattatatctcgtattgtctttatttttgattacgtaatataatatttactactgtcacgtgactgtttatgtggcattacgtaatatgttcctgaataggtgatatagccgatgcttactaaaatcctttatctaatcttaataccttatctaatcataattgtcttatcttatcgataaatggacgtaaccttaataatttcaataatcttatcacctatcactatcttttcaattataatatacaatatattgatcctatttcggttcttacttttactacttttggttaataaatcttttcctttatctttcgttgttccgatttgattaaatttttcatctattcagtatgtcattctcatatacaccctcatctcatttctcttgattttaaatttgatctattaaacccttcatctcttatttcttatttttaccattttaagcagtttctttatttctatatgatattcattttattttttttatctatcttagagataaatactatttatatccatctatatccacttaacccttatttcaatcttatcatattacatctcttctttaaacaaaaaaactattcctttaccttaattaaatgtctgaagatttaaaaattcataaaactttaaatactataaggtcagttttatcaaatgatgcaacttccttacaagaagaaaatgatgaaaatgaattagctcatcttggttataaacaagaatttaatagaaattatggtttcctttcaactttttcatttgcattatctatctctggtttaatgggtacaatttcaattacttacctttatccactttggtcaggtggtcctgctgctgctgtttggtgttggtttgttggtgcctgtggttgtctattgtattgcttggtctgttgctgaaattaccttcttgtttcccaacttctggtgggaatgtattatgttatcacacatgttgtccctaagaaacatgttccattaatttgttggattgatgcttggttatattttacaggtgctcttactggtacttgttcaactgattttggtgctgcaactcttttaatgaatatcattcaattatcaactgattattcttatactccttcaagaggtcaaataactgctgttacaattcttatattaattactcatggtgcaattaattcattacctggttcagttctttcaagtattactaaatattattgtattgttaatatttgtgcaactattgctttaattgttacacttttagctaaatgtccagattttaacactagaggttatacttttggtgaagtcattaattccactggttgggatgctgatggttgggctttcctctttggatttttgcaagtttcttgggttatgacttgttatgatgcaacttcaagaatgtcagaggaagttcataatgcgtcttatttaactccattagctattgcatctgcacttactacaactgctgttttaggttgggttttagttattgttattactctttgtatgggtactgatattgatagaatcttaaatactggtacaggtcaaccaattgttgaagtttattatattgcaatgggtaaaactggtgcaattgcattcctttcattagcatttgtcgttttatggttctgtggtgcagttgcaacttgttatactgctagatcattatgggcattttcaagagatagaggtttaccatattataaattttggtatcatttagatccacgtacacaagctccagttagatgtgtttggttaattgttttcattggatgttgtctttcattaattaatttaggttcaacaactgcaatgaatgcaattttttcagcttgtgcaatttgtactgattggtcatatataattgttattgcagcatttgcattaaatagagagaaaatgggtgttgcaagaggtcctttcaatatgggtaaaatttcaaaatttgttatgttttatgcatgtctttggacagttttcgtttcaattgtctttgttttccctaattatatgccagttacaaaggaaaatatgaattatacagttgttattttaggatttgttttcttttcagcaggtggatggtatgttattgatgcaaagaaatggtatactggaccagtttcgacaattgatgaaggtgaaattgatagtgaattagaaatgaatcataataataatcattataatattgaaattaagagtggtacagatgataataatagtagtaatttagttaaggataaatctaaaattcatgttgctgttgcaaatagtgatacagagtaattttaatttaatttactttattattaaataatttttatattacattatacaatttaaattcgtttcttttagttataatcctactataattaaccataggggtccattgatctcttagtagtgtacctcatcatgttcaataaggacatctcatctcatctcactagccacacaaaatataaaaagtggcgcattgaaaaaaacaaataaagcatttacgtaatccgcaattactttcctaattaggcaggtacttttcttttctttctttctcttaatattaatattaatactagccgcgtaccttaatttcaaaatacgaaagttccttcctaaataggcaagaagaatccagtggggaacttagggggggcaaattactgttaccagtagattatacacgttaagatagattagaatgataatagaaggtatataagtatagttgaattccctgttgatgttatctttatctgatataatcttgattatgtacttgttatgtagttcattttgagatattacattgaaacatcaaaccctcattttaatttaactctaaccctttcctttattattattatggtgtgactgttaatttaatttacttattgatgtttacgtaatctatatttcaagccatgagcatgtgaaaaattgtcaattttggaaatttccattggttgaagtgacaattatcggtggaattctctgggaaaattgatttttgttgatttttgttgagagattatattcatttgataataatatttgataataaatcaattatcaggggttcaagttatatcttgttaaattcactgtatcttcccgttactcatctcttttgtaaattagaataaaaaattaatttctttacattcacttctatatccaattgacaaaatactattattattattagaaaatgatatctgtattaaataagttgaaaccttcttcaactactaaaagtactgctaatgatgaaaataatctagctaatttaggttataagcaagaattcagtagaagttatgacttcatgtcttcattctcatttgcattatctatctctggtttaatgggtacaatttcaattacttatctttatccactttggtctggtggtcctgctgctgctgtttggtgttggtttgttggtgcctgtggttgtctttgtattgcttggtctgttgctgaaattacctcttgtttcccaacttccggtggaatgtattatgttattactcatgttgtccctaagaaacatgttccattgatttgttggattgatgcttggttatattttactggtgcattgactggtacttgttcaactgattttggtgctgcaactcttttaatgaatatcattcaattatcaactgattattcttatactccaactaaaggacatattacagctgttacaattcttatattaattactcatggtgcaattaattcattacctggttcaattctttcaaatattactaaatattattgtgttgttaatatttgtgcaactattgctttaattgttacacttttagctaaatgtcctgattttaacactagaggttatacttttggtaaagtcattaattccactggttgggatgctgatggttgggctttcctttttggatttttgcaagtctcttgggttatgacttgttatgatgcaacgtctagaatgtcagaggaagcttataatgctgcatatttaactccgttagcaattgcttcagctcttacaacaactgctgttttaggttgggttttagttattgttattactctttgtatgggtactgatatggatagaatcttaaatactggtacaggtcaaccaattgtggaaatttattatattgcaatgggtaaacatggtgcaattgcattcctttcattagcatttgtcgttttatggttctgtggtgcagttgcaacttgttataccgctagatcattatgggcattctcaagagatagaggtttaccatattataaattttggtatcatttagatccacgtactcaagcaccagttagatgtgtttggttaattattttcattggatgttgtctttcattaattaatttaggttcaaatattgcaatgaatgcagttttctcagcatgtgcaatttgtactgattggtcatatataattgttattgcagcatttgcattaaatagagaaaaaatgggtgttgcaagaggtcctttcaatatgggtagattctctaaatttatcatgtttgcaggttgtgtttggactgtatttgtttcaattgttttcgttttccctaattatatgcctgtcacaaaggaaaatatgaattatacagttgttattattggatttgttttctttgcagctggtggatggtatgttattgatgcaaagaaatggtatactggaccagtttcaacaattgaagatgatgaaattgtttcctctggttcatttgaagatcaatctaatatttcatcagctaataaaggtagtgaaggtgattcaattaatgaaaatgatgatattataattgaagaaaaggcttgatcccattcgttattttattttattctagattttgtatatttattttttagttctataaatttttgctttattaataatacctctatgttatattcttctaatttacaatttaaaggttgttttgtgttttaagcaatttaccatattttacagtttgaaataattttaattattgaattttaagctagtctttgagtacggaattcttttattttactataaaacaaggtttttttacaaaataaagcactattctaataattcaggtgtaattacattatatactttaatttcaaaccataagatccattataataggtatataattgcagttgaaaacaggaaataaaatcacccacaacagtttaaaatgttgtccctccaagagaatattggttgacccatgcacatactgggaggtgcccagtaaaaactttccactaattccccatgagtgagggtagaaaattaaaatctcatgatttataccaatggaaactgaaatttcaaagatagtggaagatagatggtttatatctttaggacaatcaaagacttggaatatggtagaggttaatgagattgcagatgagataataggaactaacaattcacaattatcaataatttatccaattataataacattattattaattttattaggaggttatttaatgaataaacattcattaatttcatcaaatcgtaaatcattcataatttgtggtaatcaaggtattggtaaaaccaatttacatcatttgttaaccaagggtaaattaccaattttaacagttacaacattggaacctaaaagtgataattttttagttaatgaagaattaaaggataataaaatttttaaagatattgaaataattgatttcccatcaaataagaaattgaaaaatttatatttaatgccatattttgatgataaattaaatgaaattcaaggtataatttatttaattgattcaagtaattttgattcaaaaatttgtcatttagttgcagaggaattattagaaattttcactataactgaatcaaaacctaatggaattgatattttaatatttgctaataaggatgatttatttacaagtaaaaaagtaagtaaaattaaggaaatgttagaaattgaaattggtaaaatttatcaattaaaattacataatttaaacaaagttaataataatagtgataaaattgatgataatgaagaatttgataatcttaatatggttatcaaggatggtaaatttcaatttcaattattagaaggtaatgttgatttccaacatggtaatatctttaaggataattggagtggaattagtgattggctttatgaaaagattgtcaattagttagtgtactgtatattgagtaactgtttgtacaacataatgtcttaagatagtaataagatccgtgttacgtaattttggtgatgtttatttatcgacatgaatcttctttagatactaggtaattaatcatatcactattagatatagacatatatgcaatcactaatatcgacagtatttagtgtgtcactgttactggctttccatataagtaattatcaattatgttgtaaatttctaagaccaattttattacctatattatttacaactaataaaactagattaacaaattcaattaataatggattaaatgaattaggtgaaatatataaaatacccaatgattcaattagattgatgagtttatcaaatgatgatagtattaataatagcttcaataaaaactattatctgaatataatatttgatttattaatttcattttcattacaattaattgagttattcctgattgatattttgaaaattggagattttaatataatacattttgattggtatattacactatctgtactgattatctcattaggttacattattccaagtttcttactatatttctggattttccaaatcaatgatattaatagaaatcatagtaatggtaaatattttttcaaatttggactttgtcttattatttggagtataatcatttattcagcatatattgttaccataagggaagaaattaatgggaattttatgcaaatttcattatatttactttcattatttggtatgggatgtttatcaattttaaatagtatgggttgtgtaattggttgttatgaaatttggaaattttataaaggttatgaaataattgaaattaataggaaagatattaatattatcaaaagaattgaaaattttatcaaatttaataaataatgatactttaattgatgataaaattatttgggataaattacttttaattgattcattaattagagatttaaattataataaatttaataataagaatcgaatatttaaatttattagattttcaacatggttatattgtatttataaagttatttatgcaattattaaatttattcaattaattctgattacattaatatcacttacaaaattaatagatgagaagaatattactaataattataataatgatatttattatgatggtagtggagattttttatcaattactattgcaaaagtattatttattatatttaataagaatttaaataatttatcatatgatgaattattaaagaataattttgaatcagttgataaaatttcaatgattgttaatttaattttaacaattttattcttttcattctcatttcaaaatgttttacttacttttaagaatttgaaattgttaggtaataagatattgattttaagtgatcatgaaattattaaaaaatttatcagtagagaagaagataagaataatgataataataataatattctggataatattaataaatcaatatatgaaataatttgcctatttgtatgtgaaataactggattatacgttgtttctactggattattattaaattcatcaaatatgccaattcatgttaaaaaattaattatgaatgaagaattttggattaatgaaaaattaaatattaatggtaaattattagatgttgaatttattaataattggtttgataaatggtttgcaattggatcaatttggacatttttaattctattaataattaattataatgaaatgtttggggatatttttattttccaaaataatattgatgaagaatttgtatagaaaatacatgtaaatatctactaaatactaactagcttttccgcatgacgaaccttggctaaggtcttaaaacacgtaaaactctacctaatcaaaaactatatagaaccaaatgtggtgtcaattgatgtgtcaaatgtgatggatgcaaaagttgaatcatttgtattttctttgttatcagcttcctgaacaagtctttccagtgacatttggacaaaccatgtttacaacatctctttttgcacgtcctgttctagtgctaaaacagaatctaaaatgtttcatgttagtagaaaaaacatcagctggtagatataaacctactttaccagaaaacgtctctccttgtgacttcattattgtcatggaagaacaaactataattgtaaattgttttctagtaaatttaagtggcaacttagaattgactttatgacgaaaaagaagtcttgaaagatccacctcattgataatctttcataaaaatcagacatacttggattatttagaaccaccggcaaacactgtctgaaatcacctgaaaagacaacaacacaaccatcaaaaggaacatttttctttttctcctcccttaacaagttatctactgaatagtttgataaataaacaaggtgtaagaaatgcaacaaattcagccattagcacagacaacatttaccgatgaaatcattcaaaatggtgttaaatctaaaaatattaaatccttatcgaaagacactaaaaaggaaaataaccacattaatacctcccctccaacactgatttcatctgggtttttaacaggtgaaacttcagaatgggtcttatttgataatattccatcgatgaaggtgatgatgattcattgataaatgttgtacgtgatgataataaaattaatagcacatatatgaaattaagaaaaagaagaaatttttcaatgataaaactaaaatggctaaaacaattatagaaatttatcatttaaagaaagcaaatggtattcaagagataaataattctcaactataggaatttaaaagaatcttttatacccagtaattggaaaaatatgatgttagataatttaatcaatacaaattatgataaaaataatattatctatagatgatataaagaataaaaataatgaaactaatgatattaaagatagaaatttttggcaaagagatgaaagtctatcaactcaaagtatcagtactggctcggatggtattggtaatttataaaaaagaatttgtactttgacttaatctatataatcctataactaaataaataaataaataaataaatataaataccctaaaacatctcatattttgatttttctcattccaccaactctatatctactaaaaatgaagaaacatgtagccaaagtacatgttgcaccagcaaattctaccattgaattataaccaccttttgtctttgttaatgccataccaacaggtaaactaatcaaattacaaaatgaaataacaaaatatgcagttccataccttttaccaaaatcttttggttttgaaattgctgatgtacataatggtgttaatgcaaatgaacctgcaactgcaaatccaaaaataattgtaaatgccataaatgcacctaaatgtttaccaaatggtaaccataaaatccaaactgataatgacattatagctgacattaaaatcatcagattaaaattaccatatttatctgataaaaaagttggtataattctacctaaaacacctgctgcattgaaaactgttaatgcaattaatgatgtactttcggagaatcctttacttaatgcatatgatgggatatatgtactaaccattaaaagtgaaaattcatttaaaaataatgcacatgtaagtatcataaatgttaaatctttaaatgatttgaaatcaagtaaatcattaactttttctgtaaatgacattccactatcatcaccttcattcaatctttttattctattaatctctttatgtctatcatgagttaaaattgatccaattaataaaattgtaccaatacaaaatcctaaagttctcattgtccattcgaatccaacttgtgtatataatgatctacaaactaatggccaaataacaccaccaagtgatgcacctggcattgcaattgataatgctctacctctctttttattgaaaaaatgtccaatacttgtaacaaatggtgcagttaataatgaacaaccaattccacaaacaattccaaatgataaaataaattgataaatttttgttgaatttgcagttgccattaatccacatgttgttaaaaatgtacctattaaacataattgtttaccaccatatttatcaaagataacacctgaaatcattgcaccaaacataacaaagaatgaaaatattgcaaaaatcattgaaattgcaatttcattatcattttttagcatatgagttgaaatatatgattcaattgcaccagttgaattccaaaggccaagttctccaactaatccaaggaaacatccagataatgttaaatatgccattttaccaccttctggatattcaacatgttcagttgttatattaacttctgtgccttctttagattttaaattattattaatatcctcaatatttgatgaatattcaatttctaaatccgattcggaatctgagttatttaaatttgaatcaatagatgaacgtctttcataatgtgtgcttggcagggcatgtggtctgaatgagacaacatccgcagatacttcgtattcagcactattacgcattacactgtagatatgatgaacatcaaataaaacagttgatgatcgttaacggcttcagacctgttcttttaagttgatatattataatacattttgttttttcgcttatcagttccttctaaatgcggtaataattccgagagggtgaatttaagcgagtaggagtgtattatgttatatgttatatgatgataatataattgcctttacacttggaagttaagaggggaaagtcgtgattggtgtcagttagagaccaaagttttaatgtagtaaagttgagctctgtggcttagtaagactcttaacaaagtgattcatgttgtgtatatagctattagatacttaataaaccaaacaatacttcgtctatataagaactataaatactataactaactaaactataatgtaactaataacctaatgttgtactctaacttcataggattacgtaagtacatattgaggactatattacatttaatacaatttagtcattaattagataacttcagtaggaaattcaaaggattcagaatgtgatcttttggtggtaacggaaaatttaattttgtataatcttgcaaacatacatgtttgaaatgatggtactaaagcaaatggattagctgagataaagtctatgttgaatttaaatggaatttcattagtgtatctataagaatttgttttttcacaataaacccatttatcagttaaatcaatggttgtgcttgcaaatgtattacgaataacaaattcaatatatttggtactagctaacccttttaatgtttcaaacaaagttttagggactcttgaatcatacgttttcatcgtatcgcaaattttattataatataaagtgaatttatcaaatttgtttttaatggtttttggactattaagtaaaaatgatttgtcaatattaaatggtaacttataaattgaactgaagtcaataccaattaaatctggttttattgtaatcgatgttggtaacttagaagatttggtcttgggatgaaactcaagattaacatttaaggaaaatattggattattgcctgaagaataaattgaattatcaagagagttggttaataattttggcaaaaagctttgaatctttgttgatttatccattgaaatatgcatattcataacaccatcaatttttgaaaataaatcttttttgaactcaatactggtttcagatgagtaatcattacactttaatttttcatcagagtaagttggaatttcattagatgaactaaagatcgatttggatttaccatttgagctaaagataatctcatcttgttgtctaatatctgaaacaccaacttgatttaacatatttctttcagttaaaacttcgattgcttcgatagcttgcttttcatatctttcaagttgatcatttgttgtaccattggtaaaaacataatcttcatgatctggaggtgactttccaaccctaatagaatattctctatttctgatgaaaatatagtcatattgatgtgtagtgtctttcttatagaaaggtttataagcttctaaacgagtaccaataatttgaaaattaatatagtaagaaacatattcaccatggaatgcaaaatcctttgcatgaattggagagccaggaacatcaagcctaccataacctaaacttctattaatttcaattgatgatgcagtatttgagaatgaagaaggattaagaccaaatgaaggaggtgttttcaagtgttcagtcaattgatgttcacaacaatcatctaagacataatttggaattttaaatttgaaaaattttttaattggtttacctggatcaagtattcttttctcgaaaccaacataagtattatctaaaggatcataaacgtgataattatcattatcaccatcaacacctaaaaagttgaaggaagcttcaagatcataagttgtcaatattttttttttataatttaagtttttattagattgttttacaccaatttcacattccattgatactaaaagcatttcaagaggaatttgtttttttgaataattttcaaaaatgacaaatccataaaccatatcaccaggtaaatattgttttaatggagatctttgtttataaggttttccaacaagtggcatttcttcagttaatttaatagtaacagaaagaggtaaattaattttttgtaatttatttaaattattcaataataaagtacttgaatcatttaaactataatcaaaagaatcattttgagttggagtagtagataacccgattgattctgataaactttcatcatattcaggaggttcttgaataatactataaggatcaattaaagtacgattaaacatactattatgcatttgaaaggaaggtaaaatatcagttaaataatctttaccatcaatttttttctctgataaagacatatctttaattgattgactattagaatcatcaatgtagattaattgttcattgtcattaatatttgccatattaacagagctattgatattcaaattagtttttaatagtcattgtgaaatattgagagttgggtaataggcagtagataacgttttaaaggaaatgattgcagtgcgcaatttatcgggatttgaatatattatataagtgtaagtgttaaattgttttattaatctttctagaagtttctatcgaactatatgattaattaattaattgttgggtgtattcaattatataagttagaagtcctttgtagaacatcgaaagatattactatctcagggatagattgtgagtataatatttaatgttataaaatttttgtcttgttgggaaatacattaagaatgtagaaactgaaatttttaatggagcctaattatctagaatttggtcaaagtctaaactatattgaatatcagacataatgttaatggtatgtgtggttgaaatccttagagttatttttcatcattcaccttgtgaattggtcccggtagagtttactaggaaataatttccgataagagtatatgcttttttatgaacatcatgaaagctcaatgtcaaactttaaatagcaaacatatcctacttattagttatacattgtgggaaaatcgatagttttttactatggtgctgacctcaattattatttatataaaattaagtaaaagattgattaagagagatagagatatataaaagagtaaactaaattttaaataaaaagaaagagcaaaaattataagaaattgaaatcaaaacttattatttatcattttcattaatttcacgatattcagtattaatttcatcagaatattttttattttgaatttcatcagaatatctaccacttgaaccattttcaccagattcaccttcctctacaccaccagcttcattttctaaaaattctctttcttgaattgataagttttgaacaactctttcttccatatttggaatatcagccataccataaataccaattgcaacacaacctaaaacacctgaaatacaagaaaatactaatgcaacaatacctctagcagtaaaaccagcaggtaatggtttaacttgaacattttcaccttgtaaattaaagaaatcttcagtattattagcagcattaccaacgaaaccaccacatgaggtacaaacatttttccaagtatcagataatggttcttcattttctctaataccaattggatcttcaattaatgtaagtgctaaaccttgaagtaaatgccattcaatatgacaatgaaagaaccaaacacctggattatttgctttaaatctaataacaaaatatgattgaggtctaacatatagaacatctctaaacattgattcatttcttggaatataaggagcagattcattataaggaattggaccatcttcatcactataatcaggacctctttcaacaacttggaaaacatgaccatgtaaatggaaaggatgaacaccagtatcattattattaagaacaatttcaacaatttcatctttttgtaagacaataccatgagtatttgaaccataaatttgagcatttaaagaatcggaatcattatttgctgataaaacagtacctaaagttggaatttttggagtaacataagtaatattattaaagaaagcataattaacaccattacctaaattatccataacaacatcaattgtaacttgatgatcataatgatcataattttcataatcatctaaaggagttaaccaaaaatcatctaagaaatcataatcatcaacaagatatgttttaggccaactattttcttcagcatatttaagagaattagtaacatttaataataaatcatcaggtacaatatctaacattgtatcatcaattttttgcataattgcaaaatctctatcagttgtatttttagttgtaactaagacatcatatctttgagcaacagtaatataaatcattgaagttgtatttggttcaacatagacaccatcaacagcaacaacagtcatatcatgatcttcaatccaaaaatattgagatacaaatccaccaatattaataattctgaaaagataagtagtatttggttcaacattaatagttgcattcataaaaccattcattaataaattttgaggaattggttcagcaccagttggattatataaatcaaggaaactattagttaaagttgagatattatcatgataccattcagcaagtgatataattctttcatcactataatgatctttataaggatcatcaggatcttcaataacaatggtacctctcataccatccatatattgaccttgagtatgagaatgataccaaaatgaaccaacttgatcaggtattgtaaaattataagttaaagtttcacctggtgggatttgacattgagttaaacctggtacaccatcgaattgattagtagaatgttgaaataacccatggaaatgaagtgaacaattatcagtacctaaaccattatataaatcaattataattctatcaccttttttaactcttaaatcaggccaaggatattcaccattacaagcaattaaatcatcaacatctgctaaaccatctggattacctgtaatataagttgcattccatttccaatgatgagtttctgcaaaggtagtaccaattaatgccaaaagggcagttgcaaatttcatccttgtcaaagaaatatagaagaatagaagaaagaataaaccaacattaacgattgtgattaattgaagtaaaacggggggagagaagtttatttaaagtatcaagcaagtatcaagtatcaataccatagcataataatatataacaagcataatataattatataagaaacctattggataataataataaagaccctcaccggtataaccgatatgtccttccttcactatataaaacacacgtataatcctctaactggtcttgttaacagtacatagagagagttacgtatcatcttctcaactgccaactggtgcaatctactgcctctcttcataccacctctcgctgatgtaccggccttgtcctcgtatttactaacatctaaccgtaattggccatcactctcaacccttacactgggaccaattataacacctgcatagttaacatcaagtccttgaatggtgtatacactaccaacttcatctatagtattacgtctttcactccatggtatcactgcaccgggggtaaatttatcccacattaatttaaatcctccactaccatgtacataccatttaccttgtaatctatatggttgatcatatgttgataacatacgacattgtccatatatttcatccttctccctaatcttgtcatacatttcttgacaattatcaaatactttaaattcaaatgtcttaccatcatcacctacatcaatacattctttaggatatggatatacttcgttttggaaacacatccttttaatccattcataaacttctaaactacctttaccctgcattctccattgttctcttaacgtatattctctaattaactctacattaccttctaatatatcatttaatgatgtagatcctttaataccaccccaatattgatcggttctcaatgtttgctcttcatcatatacaattataataactttacatgtctttataatctcactaagatgattatctcccataaatctcttatatgcattcttacatgttgctaataaatgtgcttcatcaataataactatatcattaatccccttattccccttactgtaatccattgatataacttgttggtctctcaatttcactcttattaatccattcaaatgatttaataactcgatgatataatcttatcatctctggatgattaacaagtaaataattccttgtatcttttaatacttccttatcaccgttcttactaatttgttgaatatcattaaataaactattcaaaacaacagatttacctgtacctgcacctcctcttataataaatactcttggtttatcaccttctttatattctttaataccattttcacaaaatttaattatatcatcctttaatgttatttgttcatttgataattcaacatgtgataatttatcaattgcatccttttctttaacacgtttcttatacttgttaggatcaacagattctacctctacaacagttctcttagatcttgtcattgctcaaaagaagaagtcttataaaaaataatatatatataaaaagacttatttctaaactccgatgattttaatatgaaaaatacacgttaatttttcatgtcaataacaaaacatctatacctttcattcaatttctcctaattcagcttaatatactacgtataatgacctcaaatacaggtcagaagacgttcacaccagcagaattacttatgacacgtaataaacctccaatacaatcaattactccaaatcaacagattcaaacacgtccttctaacccatcttcaatgaatgatttaaaaaaattattatcaggtaataaaccaattaaaaaatcattattagttactttaaaaatcccaaaacgttcattaattgtcaaatttaaatataaatcaattaataaatgtaaaccttcacaaattcaacatcctttctttaagcaaatttttaataaattaaataataaagataataataaggacaagaataaaagtattccttcaattaataatatttggtcatatcctagattatcttcatcggaattcaaagtaaggaatctgagtatagaagaagagaggctgtattctagtttaaaatcccgttgatttaccattaataatacgatctaaacctgttgttaatttagaaataaatgaaattgattatttgatatattatcaaggaatatcccacaatacacctaataatgaccagtactaccttactgtcgatgatgaaataattgatccaataaatacatttctttcattaagcaaactacagaaaaaagatattggtaaatacaataaatttttcaataatgaatatattcaaacctacatcattgaataattattcacaatggtgtgatatttataaacctttaaatcatttagaaaatttacaatcaactttcatatcaaatgatgttttcaattggattcaaaattcttttattaaattaaaatcagttaataaagagaaaagaattgaaaaattatcctataagaagaaaaaggtagatccttttataatatatgatgaagaatcagatgatgaagattttattgttccatcattagttattgaaggtccaattggttgtggtaaaacaagtatgatttattcaattgttaataatgaattaaatggatttgtatttgaatttaattcaagtaaatcaagagcaaggaaagatttagaatttacaattaaacaaattggtacaacttcgatggttagtaattcgacagataataatgaaaatacacttattttatttgatgatgttgatttaattgataatgaaatggataaagatttttggattggtttaaataatttattaacaatttcttatagacccgttgttttaattactaatgatttaaataaaatacctaaaaatatagttaatgaatcaacaattattaaatttaatgccatagaggagaagaaattatttaaatatttaaaacttatttcattatcaaggaatattaatattgatgatcaaatattgaaaaaatttgctaaattagatttaaggaaagctctaatggaattacaaatgttttcatataatttccaattatcaaacgtgggtttgaataatataacattgattaaagaagagataaatgaggatgagaataaccttacaaatttaaggaaacttgaattgaaatcgattaatgatgatttacaatactataatgatcaaattaacaaagataacgaaacgacacagaaccatcaactgaagattttaatactctacgatattcatatactgaattttattcatcaaaattattctctaatggttcaagatcaaagaaatgtagatacaatgatggtaatcattataactgcaaacatccaacaaatattttccaaacactttcgcaggacaaactctctactgaagtattccccatcatcgacaccatggcagaaatggagactctacgcatagacagtgaactgccacgtagatttgatgcatatccaatagatatcttttgaatggtaaaattacccgcgttgcctaatggggaaattttccaatattatgactcaattttccaaatttttcaccaattgacttctacacagggtgttatcatgatataatatagtcttttcttttcatttcatttgacagatagcaatgttagcatattccaactcattaagatctgtatctaccactgctagatcttcatctcgttgctttgcaacttcactggatttagattcaatagtatctccaaaaggttatgaagctagaactccaccttatgcaaaattattgaaaaatttaaatcaagttaataaaataactaataatcaacctttaacattagctgaaaaaatcttatattcacatttagttaatccaaatgaaattgctaatgatattagagatattagaggtttacaatatttaaaattaaatcctgatagagttgcaatgcaagatgcatcagctcaaatggctttattacaatttataacatgtggtatgaaatcaactgctgtacctgcatcaattcattgtgatcatttaattgttggtaaaaaaggtgctgaagaggatttaattaattcaatttcaacaaataaagaagttttcgaatttttaaaatcttgtggtgaaaaatttggtattcaattttggggtccaggttcaggtattattcatcaaattgtacttgaaaatttctcagtaccaggtttaatgatgttaggtactgattctcataccccaaatgctggtggtttaggttcaattgcaattggtgttggtggtgctgatgcagttgatgcattaactggtactccttgggaattaaaggctcctaaaattttaggtgtcaaattaactggtaaattaaatggttggtcttcacctaaagatgttataactcatttagctggtaaattaactgttagaggtggtactgggtttattgttgaatatttcggtgatggtgttgaaaatttaagttgtactggtatggcaactatttgtaatatgggtgcagaaattggtgcaacaacttcaactttcccaatgcaaaatgctcatttacaatatttaaatgcaactggtagagaaccaattgcacagttagctaaattagttaatgataattatggtttcttaaggctgatgaaggtgctcaatatgatcaagttattgaaattgatttaaataatttagaaccaagtgttaatggtccattcacacctgatttatcaactaaaatatcagatttgaaaaatgcaactgaaaagaataattggccaacggaaatttcagcaggtttaattggttcttgtactaattcatcatatcaagatatgactagagcaatttcaattattaaacaagctgaaaatgttggtttaaaacctaaaattccatttttcgttactccaggttcagaacaaattagagcaactatggaaaaagatggtttaattgatatatttgaaagaaataattcaattgttttagctaatgcttgtggtccttgtattggtcaatgggatagaggtattgatgctccaaagggtgaaaatgttattttcacttcatttaatagaaattttaaagctagaaatgatggtaatagaaatacaatgaattttttaacatcaccagatattgtaactgcaatgatttattcaggtaaaatggattttaatccattaaaagattcaattaaattatctaatggtgaaaattttaaatttaatccaccaaatggtattgatttacccgaaaatggattcgttaagggtagaaaagaattttatcctgaattagaaccaaaaccaaaaagtgaaattgaaattaaaattgataatgaaagtgatagattggaattattagaaccttttgaaaaatggaatggtgaagaattgaaaacaactgtaattttaaaagttgaaggtaaatgtacaactgatcatatttcagctgctggtgcttggttaaaatataaaggtcatttatcaaatatttcaaataatacattaattggtgcagttaataaagaaactggtgaagttaatactgcttatgatttaaatggtgataaatattcaattcctgatttaatgatgaaatggaaaaatgaaaataaaccttggattgtcgttgctgaacataattatggtgaaggttcagctagagaacatgcagctttacaaccaagattccttggtggtaaaattattttaactaaatcatttgctagaattcatgaaactaatttaaagaaacaaggtatgttacctttaacttttgcaaatgaaaatgattatgataaattaagttcaggtgatgttttagaaactcttaatttaagagaaatgattgaaaaaaatggtgataatggtggtattattaaaatgcaagttaccaaaaagaatggtgataaatttgttttcgattgtaaacatacaatgtccttagatcaagttaatttctttaaagctggttctgcaattaattttattggtgaatctaaaaaataattgctttttaaaattattcttttataaatttacattataaatacattctacatatagtatactttaaataatatacatttccattctattttgattgttcagtttctcttggttgaatcatacaacttaatttccaacttctatcatcgtcccttgcattggtttgtttaactttccaaacttctaataatattaattcttgtaaaattggaactccattaatatcaaacatatcctcaaatgaaatttcatcattaatgttagtattatttttttcatcattatctaaaaattgttttcttaaatttttaattgtctctgatctaacaatatctgtttctttattattatacacattacctaaatcacctgtatctttataagatatttgtaatgtttgtaaatcagaaataatctcagttattttacttatatttatcaacgttaatcaattttgatcctaaaaatgatttatcattatttctataatttggattaccatcaacaataaatgttaaatcttgtaaaaataatgacaagtatggaacaataggtatatcaatattctcttgtgtattagtttgtaagaattctcttaacctttcacgataactattataatttctatttggatgaataattgatgctaagaaattaaaagttccttatatttgtctgataacccatcccaaattctattaattcttgtaattaagaaactttgtaatgaagtcattattgatgctaatgaattaaaatttctcaaatataaacatgaaataccaatcttaagccaacatttaaatgcatgaattctttgatgcatttgtaaattaggttttaaaatactttcaatgacatattcacttaataaattagtaaataaaacagatttttgaatatttggtgataaatttaaatgtaatttctttgtagtgaaattttgattcaataattcaccgatttgaattgaacagaaaaatttactctcaattaatgttaattgtttagcaatttctaatccattgaaatttaataatgttaaatcatcatttaaaattttccaactctcttgtgatgcattccaccaacaatcaattaatgtcttagtatctaatggttcaaattcattttcaatatatcctttaaaccaatgtctacctaacattctacgatatgacataataatcaatttaatcattgaggtttgttgttttgttaataatactgtattcgccttagatttctttaattcaatatttaaacttaaattcaatgaaatccttgaattgtccgctattaatgtatcattacttagtttttcaagttcataagtttcaatgtcatccataaatgagttataagcttcaatttcattcaataaaccatttgaatttatacccagtgacattttagatattgtcttttgatgaagttttgatgaaatttttcttggcagtaattgtttactatttgaaatattattataataatttaatttatcgttattagattctgttggtggattaccaattaatttagatgcagttactaataattgataactttcaattggtaaaaattcttttgtaccttcattgaaaaaattaattaaaggtgctaataaaacataatctgattcaggtttccagtaactttctaaccaagtacggaaaaatttcataactaatttccttctacttctaatctttgtttctaacattgtattatcattatttattctcttatatgaattattaacatcaaatctattaattagtgcttctaataattgtgcactatcagagaaaattctaaatgttaagaaaaatgttgaaataaaaaaatatgttggtggattgatttcatctgtaagtaaatgaactaaagctctaaatgatgcaccaataactctattatccttttcacttctaatcaattctttttcaatatcaaattcatattcagctaaatatccattgtcggtgttatcttgaaacttattgtttgataagaatgtattttcatcattatcagtatcaacacttgacaaaaattctaaaccagcagaacttaatttgatatcagttgaattgccagctttaaaaattgaaaatcttttacttgctctagttgtctcagctggattaatatttaaagttgattctcttttaaattttttaacctgttcttgtatatttgtatcatttgttattaatgcatttgtacattttttaataaaagtttcaggagatatgctgatacttaaataatttggatatctcctactatttggtaaattaatcatatctttcaaattaaataaattcttcattatatagtaggcattggatgttaattcaatcattttagatgaacaaacaacaacagcacctgcttcatgtgaataaaaataaagtgatgattgattcggagtttgattattttgatttttcctattaaataaatcttttttagaaacatcatgtaaaatcctgatataagtatttaattcttcgaccatttgtcttaatttttcagtttgaaaatttaatgattttatttgcttttctaaattaagtgaatatgaacctttaggatattttttcatattatttgtaaacctcgtctcactttcttgttcattcattgttgttttcagcaaattaattatgaaaaaatattcattaaataataaattaatatgacctaagattagaccaacagttgaaaaacttttagggttatgttcaactaaatcaattctacccgatattaaacataaataggtaattaattgattataaacttcattaattctatatgaaagaataggtggcttgtcaagataggttatatccattttaactgattccatatcattccaagataattgatcaatttccgcttgtttattattattattactagtactattattattttgaatattgttgatactattactattaatattatcttgttcaagaccccaaatatctaagaatgtaatagccttctgtaataagtggaaggtaagtaattgaaggtattcaattttagttgacgaaattgtacccatgtattctttaccctttgcaattaaatctgcccaacctcttaataatttctttctcatttttctaacaactggtttattttgaacaacataattagatcttgaaatacaatcagtatcaactaataattttctaataccatcagttataccattaaaacattcaacatcaaatgtataaccacgtaaaacatcttcaattgaaacaggttttgattgaggattcaataagaatttacctgcatgttttaataataatttcaatggagctcttgtatttgctaattcctttgatttcatactatttaattcatttttagaaaatccagttacaacagttgaacggaaataattcattgggacccaacctctctttaatgatgatagaagtgttacttcaccccaacctgaatcatctaaattatatgtgaatgcaatttcatcttgatcaaaagataaacaaattgatgaatcattttcggattctaatgattctgcattgaaagcgtaaatggctgaaacaaataaggctgaagcatcctcatcttcaaattctaaactgtcattatttattgatggagtaaatgaaagttccgaatttctttgaatgttctttgaatcatctttatttttatttttatattgatcagagaaaagtgactgatttaataccgatactcttgtttttgttggactttcttcactaatacttttatgagttatgtttgattgtttaaattcaagtggttcatcttcagcaactgattcgtatctattagtaaatgattgacgtggatgtttttgtttattattatgattattattatcatttgttggattagtgttattagtattgttattgttagtgtaaagcagagtttaaggatgaaattctaaaacttttcatacctttattcaaatcttgagttttcctatttggtaattctgaataaacacttgatgttgtactatagattctagaattttgtgatatacctaaatgagaagtttcaggtattgatctttgaggtaatgcagaataaacacttgatgtagtactttgaattctatcatttgaaggtatttgaaagattatgaatatgattttcatcatttatattttcatccttcaaaaattgggttggtacggaggaatttagaaatgaggaagtattatttgtataatctatatcattttgaatatcactttccttcattaatttgaagtttctcaacagatgaggcttagtttattgtttttatgatttgattcaagggtaccatttattatagtaggatcgtttttttcttcctctaaattgactgaacttgaatctgaatgtatttcaacaaattcatttaaatttctatgtttatttaaatcatcactacttaaaggttcccaattatttataactggtgataattttgaagttaaatatgagaaatctgctttagcgatgttagaatccacaattcgatcatcaatattatcattatcatggattgaatgtgaagatttactaggattcaatcttaatggtgaagtttcaggtgaaacattaaaggaagtatttgtgactatttaatgaaaggtagttaatgttatgttagtattcttttttcaatttaaattaaaatcatatatacatactgtcttccatgtgttagtataatagcaatgagatgtattctatgtattctaagtagttaattatacaaaagcagctgagccaaagaagaaatagagtttaaaaaaggggaaaaaaggggaattttcaaataaacaccttaataaaaaaaaagtttcaagacgcgttaataaccaattttgatacttcatttgacaaatattggcattcttcaacacttgctgcctctgcataaactctaactgcatcctctgtaccactaggtctaacgaatgatctaccattagtaactgtacttactaaatgatctatatctttttgaattggaggttcaactaatttcctttcagcatctgtagttataaatttattacgatcattaactataacttttgttaatttattaggtaaatcaatatacgtgtttgaccattgtaattttgatttcttaagaattgataatgatacaattaccgctaataaatcactaattgcatcaccaactgtttgattgattaaatcatttaataataataatgatttaattgaaatattctcaggatgatcatttaatagggaaatcattatattatggaaattttcagagaataaaacagttccatgtccattagcttcaaaatatataccaatatcataattaagtgcttcatgatgtaaatgtttaacaccagttttagcacaaattgaaggtaaatttaattcattaatgataaaattagttgatgatccattagcatatgctgtttgaattataccgattgataatttactgtggtgagtttctggtaattgattaattaatgatgatattaatgatgataataggattgcaattttatcaccatctaataaagtaaatttattattagtattatcaataaaataacatactaatctatcagcatcaccatcaaatgatgcgcataatgttgaatcattagatgcttcaataggatcaatacctgaaggtaatttttgattagttttaacaaaatctgcaccacaattaacatttaaagaagatggaatatttgtttcatcattaattattttaaatttattagataatgaggaggaagtggaagtggactttagaaataatttcagtttatcagcaccaacaccatttgcacaatcaacaattaaatttgtaatatcatttggtgaatgaccattaattgttaataattctatgaaagaatttgataatttttcataataaccaatttcagttggtttaccaaatgatttatcattaaagcaacgtgtaatatagtgtaattgaggagttgttaattcattaaaatttttataatcaacaaatggagataaaatatcgaataattgagtacaaatatttaataatcttgaaccactctctcttgtatctcttgcaataactatacttgctttaatgtttggattaacaacatatttattccataatggttttaaataatctttaaatttttcaaaagtagtacaattagaaagttcagttactattggttcccaaatttgaggtaacatatcaccattgggatcaataattttaacaccattatccatgggaggattatgagatgcagttatcattataccaattgatttattattacatgaaaatgaacgtaaaattgcaataattgaaactgaaatcataattgaatcaagtttggtggcatttaaacggaaacctgctgtaccatattgaaaatttgcattagcaggtggaggatatttattgaaaattgatctaagtgaagattctgggaagttcattgataaagaagggtatcttgattagaatgacatgacatgtcaacatgaaattcgaggatgtatagtaaaatgatatttctttattaggaataggtcttttcctatatactatacgacataaatggcaccatcattaccaatatatacacgtaaagagatagaagaacatactgggatagatataaataatttaaataatgataatataggtaaaaattgtgaattaaaggaattaatacaaaatcaatgtacatatgatggtaataatgttaaatgtttaccatttaaaaggatttttttacaatgtttacaatataatggagataatgaaaagataattggatataaaatacaaagtaagagaggattagagaatatacgagataataagagtcagtttaggaatattgagataactaagagggaggataatgtatatgatataaatgataatgaaataaatgaatttattaaagttgatgaagtatttcaaaggaagattaaagaatattatagtaaacagtaggtaggtattaggttatataaacactgttatacattataaacttcattttcatttggttgaggtaattttttattagctggatcagccattaatttacgtaaatctaataataaaatttctattgaataattataattccaattttgtaaagttttaaattttgaaggtataacattaccattattattatcaacacaaggtaaattaattttagaaataaatttaattgttggaggttccaaggggtaattattaccaatatgaattttcaatgaataaattctattttcatgatttgaatttggaggaccaagtattgttgcattccaatttgacattgtaatatcatcaggatttgataaaccataagaacaagaatcaggacctaaccctttttcacctttctctaattcttccagtagtttaaaattacgtggtatctttgacattatgagggtttatcttttattaatatctaatgtaatatccaatataaaccacctgtacttctccttactaacctgggtcctttataattatcattaatgatcccctttttaaaataattccaataaataattacgtaatcacaaaataaaataaaataaaatgatgacgtaatcaaaaacacttcgacgcatcgtccccgtaccgcccctaccgacccatcgaccctgtcttacataataaaaattatcggttccgagaaaacgttggaaaatcacaaaaatgagaaattccgccaatccgcgcctttacattgaatgaccctccctaatctctgaaatctccatctgttgatataaatattcgattaaagtaccccccgttctggattctgttagataacttctattctttatcttatcttttgaatttcttctcattaatcaataacaatgtctttaagaaatattgctaaatctgctactagagcttactcaactgctgaaccaactttaaaggaaagatttgctcaacttttaccaggttggcaagctgatgttaaagatttaaaatctaaatatggtaaaaccgttattggtgaagttttacttgaacaagcttatggtggtatgagaggtattaaaggtttagtttgggaaggttctgtcttagatccagttgaaggtattagatttagaggtcaaacaattccagatattcaaaaatctttaccaaaggctgaaggttcagaagaacctttacctgaagctttattttggttattattaactggtgaagtcccatctgttgctcaaactaaagcattctctgctgaattagcttcaagatcagaattaccaaaacatgttgttgatttattagatacttgtcctgcaactttacatccaatggctcaattaactattgcaattaatgctttagaaagtgaatctaaatttgctaaagcttatgctgatggtgttaataaaaaagaatattggaaatatacttatgaagattcaattgatttattagctaaattaccaaatgttgctgctaaaatttatagaaatgtcttcaaggatggtaaagttgctccagttgatttaaacttagattattctcataattttgctaatatgttaggttttggtgaaaataaagaatttgttgaattaatgagattatacctttcaattcattctgatcatgaaggtggtaatgtctctgctcatactactcatttagttggttcagctttatcctctccatacttatccttagctgctggtatgaatggtttagcaggtcctttacatggtagagctaatcaagaagttttagaatggttagttgcaatgaaggaagaattaggtgatgatattttcaataaagaaaaaattgctgaatatttatggaaaactcttaatgctggtagagttgttccaggttatggtcatgctgttttaagaaagactgatccaagatataccgctcaaagagaatttgctcaaaaacatatgccagattatgatatgttcaaattagtttctaacatttatgaagttgcaccaaaagttttaactgaacaaggtaaaactaagaatccatggccaaatgttgattctcattctggtattcttttacaatattatggtttaactcaacaatcttattacactgtcttattcggtgttgcaagagctttcggtgttttacctcaattaattattgatagaggtttaggtatggcaattgaaagaccaaaatctttctcaactgaaaaatatagagaattagttgaaaaaattaataataaagcttaaatttaattagttaagtattatttctttaaatgtcatgacccttatttatttatttattccttaataacttatagtatatttatagtttgtttataatttattaaattatattatattccattataaaaaagaaaaaagaaaaaataattatcattattcattattatcattcggatccaattaattaaactgttaaaattaccgttaacaaaatttaaaaaaaaataaaataaacgttgcgagctatgtggatcgaacacatggcctccagatcttcagtctggcgctctcccactgagctaagcccgcttcggttatttttcaaatgctttgttttgttccacctgtacttactcacgtgaccggtttttggatgtagtatttttgtttattttaaacagtattctatcatattttaactgaaattattaagtaataagactaaactgtagttgggtttagttttatgttgaaaatattaagaaaattgataattttaaaattatttttcaatacattgaattatcattttaaaaaaataaaaattgggttatagtttttgggaataaagtagcttttttacaaaaaatagtgaaataacagtttcaatggtgagatggaatagtaatcatatagtagatcaagttaagttactaaaatgtcaacaaataaacagtttaaacaatttttacaattttctaattaatttttgactaaatagtaggtttaattttaataattcaatgtcatatttatactagttatatcttataacactatagatgaattaattgatgcctgttatagaccatatatacaaagaaagtaaaccgtttgatagaataaagtcatttcgcagtgaattttcatgttacttggatttaactatttcttctttcttcatttcacaatattaataaacaagcttataaccaatatgatccaatccaatacagtacattaaagaaagttttaactttaatagttataaaaaaaaagccgttttcaaaataaacttaaattaaccaataatttccaatatattggtaattaaatttactgtatgggttaagtataaaattaattacattttatgatataaaaaggatgatatatctatgaaataagggtcgaatacatttattcaagatgataatacttattagacaataacaaatgactgcagttaaggataaaaatttaaagaaaagaaaggaaccaattccagttactttattatcaggatttttaggtagtggtaaaacaacattattagagaatatacttaaaaatgaacatggatttaaaattgctgtcattattaatgatatttcaagtttaaatattgatgcaagtttagttataaatcataaaattgttacaacaaatgaaaaaattattaaatttcaaaatggttgtatttgttgtactttaagaggtgatttattagaagaattaattaatattgttaaaaatgaagaatttaattatattataattgaaagtacaggtattggtgaaccaatgcaagttgctgaaacttttacacaagaattttctgaattattaattaattcagctgaaaatgatgttgaaaatgatggtgaagatgaaaatggtaatagttttaatgatcttaaattgttacaagaaattgttgatatgggtggattaaataaattagctagattagatacatgtgttacagttgttgatgcattaaatttttcaaatgatattgaaacaactgattatttagctgatagatggggttcaaaaaataattcaatgaatgaagaggatagaactgttactgatttattagttgatcaaattgaatttgctgatgttattttaattaataaagcttcattagtttctaaaaatttattaaagaaagttaaaaaaattatttcaactttaaatccagttgctaaaatttatgttacaaattattctaaaattaaaaatgaattaattttaaatactaaattatttaattttactaaagcagttacatcacctggttggttaagaagtttagatgaatcaaattcaaaattaggttatggtgatgatttaaataagaaaagaataactccaaaacctgaaactgaagaatatggtattaataattttgtttatagagctcgtaaacctttccatcctaaaaggttatatgatctattatgtgataaatttcaaataattgaaagagttggtatgcctgaagaagaagttggtggtgaagaagaagaggaggaagatgatgatgaaggtgaagatgaggaagaagaagaagaggaagaagatgacgatgaagaaggtgatgaagatgttttaactaaagaagaaatgttaaagaatagaaaaaattcaccactttgtaatgttgttcgttctaaaggttatttttggttagcaacaagatatattttacgtggtgaatggagttcagcaggttcaatgttaacacttaatgcaggtacaccatggtttggtgcaatgtcaaaagaattttggccaaaagataaagaaactatttcatcaattagattagatttccaaggagttcatgaagatagaagacaagaaattgttttcattggatttaagattaaaccatcaaaaattcaaaaattatttgatgaatgtttattaactgatgaagaatatattgaatataataaaattgcaagtcaaagagatttagttaaaattgagaaaactttatcaacaatgtatgaagatggatttgaagattgggattttattcaagaagatgatgatggtcataataaacattaattggatttatatgaaaacattttcaaatccattaatatcaagtataatatcccaaggttcaccatattttgaatattttttccaattagtttccaaaaactttataatactcataattgaacctgactttttagtttcaccaaattctttaattctgtataaaatatattgacgtttgtcattttcattaataactaatccacaaataacaaatgaccataaacataaacaactagcttgtgaatgaattgatatttttttaagattatcgtaaaaatcatttgaagcttcaataatatcataattgttcaatgactaagttggattaattattttctttaataaaatatatgatgcttttgcaatcatattacccatataacaactttccattaattgattttgaatatttttaggtaatgtaaacttaatagttgtaaacataactttcagttattgttttttcaaatgatatattcatttgataataaatcaactatttcattaagttttcgttgaaagagtgtaaattttcttaattctaaatcttcgccacaatgtttcaaatattttagttcattatcctacaggatcaaccaattaatcatgaaacaattaaaaataatgaatttcttattctatttttacattgaaatttttctcttaaacatgaaaccattaaacataacaagacctctttagaattttcaatacttttaatatcatttcaatacatttcttgattatcaattcttatagttttatcattactatcctttgttagccttattatatcttcttctttaacatttataaacttttttcttttgattttggttttagtaggttggaaattcttaggatttgtacctggtaaccaccattcacaaactaaagaagatttatcacaattggaacatgaaggttttgcttcattacattttagttttcttttccgacaacataaacaactagtggtgactcttttaaacttcttctttaccattttatttggtttttggtctaataaaactttaatctccataactattagtagtacaaggtgagtcaaaaaagttaagaaagaaataaataattgtaaattgtagtaaattgatttgacatgataagataagataagataagaaaatacgccggtgatacatctccgaagtattaactgtaataactattatgattacaactttatatacaagagaatgaaactatacacaagagaatgatagtagtggtagaatatacactactttttaggattaaaaacacctgagataatgatgaaagccaaaccaactaaacctttcaataaatacacggaataaccattaaataaagacataaatccatcaattttaataattttaaagatattttcatttgataaaatcattttaacacgtaaagtttcaagaggataagttaatgatgatgtaaaaacagtaataagccaattaaagataaaaaatgaaaggaatccttcgtttttaacataattagtgtaaattggtttaatgaaatccattgctaaaataaatgtaagtctgtaaaggataatacctaagatagaagaaatgaacccagtatataatgaaaataaaccatttgaattgtaaattgatttatagacactaataatacctttatattttaatggtaattctttattaatatttggaatatcagataatattttaacaataacaacatctaaagaataaatgaaaaacatattaacaataccacgtaatgaaccataaattattttataaaatgtatcaatccaataattaccggtaatgttttgaactggaacataaagatttgtgaaatatttaattatttgaaatataatagttctaacaagtcttggatattcacctttccaaagagaataaaaaccttcattatctctaactctttcaaatgcatcattaattccattgaatttattagcaattaaaccagaatgaagtaattgatcttgaccctgtaaaagtgttttaaccctgtttaagggaccttcaaatgatgattgaatagctctaatagctaagaatgtggcagttaatttgtagttcacaggttgttgttgatcagacattgtttaataaagaaagaagtgtacatatatattatacaaaacatcactggtcacacattgttagaaaccttaattggtgaaaattggaaacattttaagaaaagtaggtgtttatcggatatttatataaattgtgtttgttgatgatgttaatgtcggtaagaagtgtgtgtatacaatggggaggggacagtagttgatattgatgatgattgattagtatagggtatatagtctacagataccgattatagatgattcaccccacatggaacagatgttttaaatatgacactgaatcctccattgatggatggcaaattcacaactaatgatatattagatgatacataccacatgccactcattaatgtacctgtaggtgatgcaaaacctggtgaaactgctcctagaagaaattatttagcttaaaaatggtgtcattaactaaaccaagaggttataaatgttcaactatttatgaatttttcaatgaatgtgttggtagacatggtaaaacttcactttgtcaaggttggagagatttaattaatattcatactgattgtaggaaaatagagaaaataattgatgataaaattgaaattattgaaaaaaaatggtattcttatgaaaaatcagattataaatatataacatttggtgaattacaatcaattgttaattattatggtaaaggtttaattaaaattggtattaatcattccaaaagggataaattacatatttatgcttcaacttcacttcattggatgagaactttccttgcttgtcaaactcaaaatattacaattgtaactgcctatgaatcattaggtcaagaaggtttaattcattcactttctcaaactaaatcttgtgcaattttcactgataataatctcttggataatttaattatacctttacaaaaagtttatcatattaaattcattattttaaaaaatcatgtttccaaattaaatcaattaacaattgataaaattaaatttttcagacctgatattagtttctattcttataatcaaataattcaaattggtaaagaaaatgatgatttaattgatcatcatcctccaattgcaaaagatttagcttgtattaatgtatacatctggttcaacaggtcccccaaaaggtgttgttttaacaaatgaaaatttaattgcaggtgttgcaggtatttcaaataatttaccaaatacattaataactaagaatgatagatcattagcttatttaccattagctcatatatttgaattaactattgaattagttaatttttattggggtgcaattgcaggttatgcaaatgttcaaactttaagtaatagatcatgtaaaaattgttatggtgataataaatcttttaaaccaacttttatggttggtgttgctgcagtttgggaaaatttgaaaactgatataatgtcaattgttgataatttatcaatttcagatcaacaatcattttggtcttcatataatttaatttcaaattcaaattcaaattcttcttttccttcatcaataatgaataaaattaaaaatgatacaactggtggtaatttaaaatttttattaaatggaggttcacaaatttcaggtgaaactcaaagatttttatcaaattcaattgctccaatgttattaggttatggattaactgaaacttgtgcaaatggtacaatttcaattccaaaacattttgaatttgatgttgcaggtccattagtaggttcaattactgttaaattaattgatgtaccagatgcaggttattttgctaaaaataatcaaggtgaaattttaattaaaggtggaccagtttcaaatgaatattatcttaatccaaaggaaacaatgaaagcttttcaatatgaaaaaggttggcttagtacaggtgatattggtgaatggactcctaatggttcattgaaaattattgatagaaagaaaaatttagttaaaactcttaatggtgaatatattgcattagagaaaattgaatcaatttatcgttcaaatccttatattttaaatatttgttgttatgcagatgaaaataaaacaaaaccaattggaattattttaccaaatgaattaaaattaaaggaaatgattttcaaattaggtttaaataataagaataaattaattaatgatattgaaccatcaaattattatcaaaataaattattaattaatggattacataaagaattaattaaaacaggtaaatatggtggtttaaaaggtattgaattaatttgtggtattataattgttgataatgattggacaccagaaggtggatttttaactgctgctagaaaattacagagaaagaatattttatcaagtgttaaagataaaattgaattagcttataatagtgacctgaaaagttatttataaatcaaagatttgttttaaactatatagctgtggatttgacaaataaagtatgtaaatttcttaaatatctaactaatattaatatatacagtgaagtttttcacttaattaaattcactgatttctttattgattaagaagttccacattataatcaaatgagtgacgttgatcaaggtactactactaatactagaattgttgttgatgacaatggcgaaattttaattgatggtatttctttcagtaaggaaagaatgttttcattgtacaataaatttttgaatatttataatgatggtttaaaaaagttaaaaaaactgggtattgatcttgatactgttgaatctgtttcaagtcttggtatttccaaatataaggttcaaaatgatgcattttacaattgttttgataagaataccattaaaaaatacaagaaatttagtactggtaatcctgttcttactggagaaaactttcaaaatcattacagacatgtcttctgcaatgttattgctgttgcatttttcttcaggtggtacttacagattatctgaaatatgtcattttcatatgaataataatggaactgttacgaaattatatcaacctgatgatgggaaggcttatttatatattgtttctgattattctaaaaaagttcttattgttaactgatgaagttaccaagtattttattcactttattttagcattatacccattgaggcatgatgcaagtgaaagacttacctttagattcttcagttaatgaacctagtcatattttgaatgatgtagaacttggttttgatgatgattttcaaggggataattgaatcttctggtttaattactgcaaaggactgtttaaatagatttgtttttacggttcctcgtttgaagaataatgagtactatgctagtaggatggttacacctattttgaaagactttattgaaagttgatgaaagtcgaagttacataacagattccaagtttgagacaagcactttttcattacaagaatgaaactggttttaaagaggcgaataatgcattcaaacaattacagaaaatcatgttttcaggttctgattatgatgaacgtataggtcttgaaaatcaagttgtctttgcaaatggttctaatattgaaagaattaaaatttttcacactttgtttgttttcatggagaaactgaatcaaaatttaggtttcattacaaaagttacaggtggtaagaaaaatgttagacttcctatcaatgtaaacactgaaattactctgaatgaatttaatagttctattgaagaattgtatccaagtattaattttagaccgttacaaattggattgatgagttatattgctagtattactgttccttatagttttcaagctgcaactggttttgataagacaatgatgtttacttgcttattgagagctattaataagaaatatcctactttgattaatgcaattttggtaccctatgctacattaagagctaatctaaagtcaagattgaataatttaggttttacagttggtgaaattggtcatgttaattcatcgaaaaattatgatgtttatttaggtacttatgaaagtgttaaagaatcaactttttcaatggacaaatctcaattaggtctgttggtcatggatgagtgccattgcattttgttagaagaaagttttagtgaaagtagcaatgatattttaccacatgctcatttgaacaattttgaaagaattttaatgatgtctaaaacattaaatgaaagtatgtcaaatgatgtatctaaaattttaaacattgattgtctaccaaggtatgaaaactttattagaagtcttcctcatagtgatagaatttttattacaagcaaattctctgatccaagaaacttgtacaatcttttgaactctaagattggtagatttttagcccattcaaagaaagggaaagtggtagttttatgtggtaatatggctgatgttaaaattgcatatgaaaattttccagatccaaattttgcattgatggtacatggtcaatcaactgataaaactgtagttactgattcatttgtgaacgatccaactaaaagagttttatttggtactaaattaatttcatatggtattgattcttctgatgttaagttggtcatttttttcaaatataatcctgatgttgttacctttattcaaggtatgggtaggattcgtaataaaggtgtctgtttatttattgataaagttagatactgttttacaaataaaatgaaaagtttttataacattgaaggccctgatcatgaaagttgttgcaattgtccagttgaagatttatttatcagaagaattttaaattgtctcgatgatttacattttaggggttacgttgaagatttggatggagaagatttggttgaagaagattcggatgaagaaatgtaagcattcaaagagaggggaaaaataattttaataatgttgctgatgtcattgaaaatgtgtatcatgaaaattttgatgagtttgttgtgcaatctccagttgtgaatgaaaataatgatagagttaatgatcaatcttcaatcagaaatgaaaataattttatcgttaatatgctcctatgagaaatgtgatacctaagtattgtaatttaagtgattttgatgatatgaaatacagtggtgacccagaagaagcagaaactgttaaaagggcactgaagaagatcttgggtctggtttaagtttcaatggggagttaaatggaaataataatttaagaactttgattgatgatgctggtgatttatcaagtgttgctagttcacctattagaagaaataattcaaatataaactaaatatatttattggaaagctttgcaaatgttgacgttgaaagtaggtttagaaatttattaccgatagactttgtttattttcatacaacatatagaatcgatatggataaaattttggatgaagatatattggtaatatgagagaacatttgattggtattgatgatttgtataagaggtttccaattttgcaagtaatcaatagtgcaaattataggttatatgaatattcgttgattgaacatgtgtttaaagatccaatgtttatttgttgttttgcagaacttgttcataaatgaactatgtgcagattttattatttcaatttttgagaaaagagatcttgggggtatgaagggaaaatttatggagttgaattcagaaatattggaaaagtattgtggttacttgaaggaattcaagatactttcaattgatttgattaaatacaataaacaaaaaatcgagtttccaaaaagtgatgaattatggagaaggttctacaaacgtcataataaaaagttaagatcttatccatgggaaaataattacaaaaggaagtatctatctattaagagttttgctaaagatccaatttatagaacaccgctataccttccaaatgaaacaaagattgttttggttcatgttatagatgtttgtacacaaagattgccaaggctgcaaaattagttctttttaacttgtatattgacggtattgagttgaaagaggttcctgaagaattagaacaattaaataacagcaaactgttcagtatttatatgattctatgtttgacaccaagttatggttatatttctttttgtcgtggtcttgtataattattgtatttttagtaaacatttaaagtcccttttgaatgaagaagaaccttttatgaaatgaaagagaatccattgtcggataagctgtctactagaataaactccctcaaggaaattggttcttctcattctggtactttgtaatcggataacaacgcagtttccttaaactataccaatactaaaagatttacaaatcccaccaagaggtgtttacgattatgatgtttttcacaactataaaaatgattttggtagtatagaaatcaacaatatttatttgcttgattgtatccaaaatcttcattaaaatgcaaaaaccatcatttacgcttttcttaaaaatctgtactttattcatttataatattaaattttaataaaaaagttattttatattatagaaaagacacaaattattatagatctaaaaaaagcaaaaattattctgtagtattcaaataccattccatggtgtactttctaaaagtcttacctctccaatacattataataaaagaaccactaatcaccaaacaaaagcatgctaacatgatagtggttcccaaaacaccaactccatccaaccaatattggaaaacccaagtaaaaactgtagcaaataaatttctaacaaataacactgaggtcattgtatcatttggctgttttggataacattctaacacataagtcaatgacaatgaagtgatactacataaaccaattgaaatcaatccaataccaattgcaccaacaacccatgaagcaccatataatggacccaaaccgtacattaataacccaccaacatttaatactaatggaattgaaatcatcaataaacgaaattctggttcaaaaataccatcgttttttttagtcatataaatttggaaagaatcagagaatgatgaatataaacctccaataagtgtacctgcaaccattgctaaatttaaaagacctaatgtatttggtgagaaattgtatggtggtgccataaagaattgagcttgtgtgacagtaattaaagataaccaacaaatttgaataccataaacaactgatgcccataaaactgctggatatcttaaaacaattaatgttttaataatactgaatggagaaagtttgctatcattgagagtgaatggatataatctttgaaaataagtttttggttcatctatttgttcaacagaatcaatcttgtcactatcactatatggtgcttcatttacaatcacttgagatttttcattggaaagtaataagttttgatcagtagtatttgtatgagtatgcattgttctatttgacttcacaacttggagtaacttttcatcaagttcaaaagtatcttcagcttttcttgtaaagtaggattcttcaaggaagaaaaattgaacaactaataaaccaaagcaaataataattgagatatatccacaccataaataacctaaatctgatgtaatataacctgctaaaaatggaccaaatgcagaacctaaacctaaagttaaagtgtaaattccaataaacttaccatgatcgtgcaaaaagaaaatatcagcaattgaaacttcaaccattgaatcaataggaccagcagcaattccagccataatggagtatccaataaatccagaataagtggttcgtgtaacaaaaatgatgcaggcaataattataaatgttgaagaaagtagatagattggtcttctaccaatcttgcaagaaactggttggcatagcaaacaactaaaggctaaaaatagaaaagttaaacctttacctgtattcaacttgtttaaagatgcatcataaactacaccaagcaaggtgtagatgggaccagtgaaatttgaacatgctgcaagaatcatggaaaaaaagaataaaatcataaagtgtaatattttccgaaagtaagaccaatttaatggatcatttggacttttagatggttgaggaatcaaaataatatcggaatcttttttgttggaaattcctaaaccttcaatctcatgttgttctccgaccaaaaccgtggttcctggaatggtaagatcatcttttaatgacttgttttctgtgagaaacattgtttttttgttgattgtttgtttttgatttgtcagaaatatatgagaattaacacagttcaaaggtatttacaaagttggaaaagttattggctttaaataaacgaagtttttcaataacagtagtgatgataagaaataatgatagctgctatcatatatctttatctgataagagtattcgatggagatagaaataaatcaatttaacgcttccgaactcaatgtgaaaaaaaagtttaaattgatctgacgttttttttttattttgcgcagccgctactgataagaaaattgattttcccgattgggtctgataagggtctgataaggtctgataagattatcttaagcgcttgcgttattctttcgattaggagctccgatataataatatttaaatgaacacagcaatctactaacagaaaaataacttgcatgtgtgaagataagtgtcaaaaaaataacagcaatccaatgacaattacaacagattgggaaactgcagctaaaaacaagaagaaagaggtttcatcaaacattcctcaagaatggttacttcctactgatttacttgaaaaatacaatgaaacaacatctgtttctgttttagatttgccaaaaaaactaatgtctgctgaagaatttaaaattacagaaagttacacagctctggaattgttggaaaagcttaagagttcagaaatctcagctgttgacgttgttgacgctttctctcatagagctgctattgctactcaggttacaaattgttgtactgaacttatgtttgattatggtaaaaaaagagcagaatttttagataattatttaaaagaaaataataaaccatatggaccacttcatggtttaccaatctcactaaaggatactttcaatgttcccggttatgattccacattgggacttgtttcacaaataaacaacaaaccacaaaataagagtgacttggttaaacaattggaaaacttaggtgctgttttttatgtgaaaactaatattccacaaactttaatgactgctgactcagagaataacatttttggtagaactttaaacccaaataatttaacattaacagcaggtggtagcagtggtggtgaaggtgctttgattaagatgaggggttcaattttaggaattggttctgatatggcaggttcgataagaattccagcgttgtgtaatggtgtctatgggtacagaccaacttctagaagatgggcgtggagtaatcaaatgaatttgtcaagagatgtctttgttgctgttgagccagttgcgggacctttagctgcagacttagaaacaatttcatttttaactgagattatttacaatgataaatcatggaggtatgactctgacaatttgagaattgcttatcaagatccaaaaattaaatctggtgataaattatctgttggtattgttgttgaagatcctgatttaccagttcatccaccaattaaaagaatcatcaaagaagttgctgatattttatcttcaaagggacatactattgaatttttaactgaatttccatcttatgacaaagcatgggaacttggatgggcgtctttccaaagcgatccaaagtcaacagcaattgaaaaattaacatgtactggtgaaagatttattaaatcactttgcttaccaggaatggatgtatatggaaaaggtccaactgatattgatgaacttataaaacttagaactgaaatcaacaagtatatgaaagaatggacacaaatttacaataaatatgatgttattatctctccaggttctcctggtactgcaccacctcatgatacatatggtattgcaccgtataccaccatgttgaacatcttgaatttccctagtgttattatcccatttggtaaggttgattcttctgttgataacaccgatttaagtactgtttaccctgaaaaattggaacatatttatgcacactattcattagatacttacaagggaggtcctggtcatattcaagtatctgcacctcatcttgaagatgaaaaacttcttgcatgttgctcaataattgatcaagctttgaaaaaatgatttttttatatggtatatcgttttttatctaaattaaattttacttattttacttaaactatttaaatcaaatccatcagcttaaaaagatttgattcacaatcatttcattttctagcatctctaaacctctattttgattccatgctagttttaagttatctatagctcgcaaatctccaacattatgtgttatttcccactttttccctaagtaactcacaattttgtcttgatcaattttgttttccaaagttaagccaataataaatattccccataatttaaaaagtccatttgccatatcagaatcgtttaaactattaaaaactgaaaaaaataactcctttagctcatctttttcaatctggctggcaaatgggaaaacatctaaaagtaacattttgcaacctatcagtgtaatgtatatcattttttggcttgatttaatttctttttccaacaaatcattgaccgccagtaccagtgttgagtagaattcgttatcataagactttttcctaaataaaaatgatgttttagctacgataggtaaaacatcgagtgtttcacctaataataagtttgactctgtagttgctttatctggaaaatatgatctcaaaatgtcacataaaataaacggatgatatttatttaaaagctctaaaggtgttatgagtattgaaactgaataatgataaaataaactttcaattaacagtctaattgttcttgatgactcgatattatttttacttaaaataaattcaacccctgtgtaaatatccttcaacaactcttcattgtttgagctcatgtatattttattcaaaatactaaatatgatcgaatgtaatatccagtcaaatgaatcactcttgttaaacgatttgagaacttgtgtcattgcctttttatgaacttcgttaataaccgcatgtttggaaatgtcaacactaaaaagatatgcagctgataatgatgttagaatatctctaaattcggaactttttcgtaaagtttctaatgttagttcagagatgacttgtaatgattcttttggaacgagtgatttaatagttacattaaaaaatatgttaaaaaggtgatcaaatggaacattatttaaaggatgtaatgctaaattttcacttattatcaccatttgactattgtttcttaaaacctctaaattttcttgctcttctttcactaaattttgttgtattttgtcacttgttgcagttttgaaaacacattgtatttgtttgccaacacatctattgcattgtggcttattttcatcacattttttctttgctttgctacaagcaacgcaaccgtttctggatcttctttgagtctttgaagttacctgttccaaaatttcaaccccgttatcatttatgaattgatttacagtttgcttggccgtaccccaaatacattgaatatctttcttggagcataactgacatactggtttagtttcatcacactttttccttgataacctgcaagaaatacaccctgacttagttcttttgattttttcctgtgattttggcattgttgtggtacatatttaacaacatcatgaaaagtgttaacgttaatattgataagttttgttaaaggttcgatccttatctcaacccaatcaaacatttttgttattacgtaatcacggattagctaacatgaattatcattaattttccaattgattcaagaattctgaaccaagatttgctatttaaaactatttagctgtagatttggcaaaaaaagtatgtgtaaatttatatgatcctaaattatttgaatatgatattaaaactatcaaagaatatgttgcaggggggaagagcaataaattgagtcaaggaaagtatcagtgctattttaaaaagattaagtaataaatcatcttttgtaaattccatctagaacaagaatttaggtgctaaaaatcttaatgtaaattctattgtaaagtattatttgtaaaatgggggcacggttttgaaaatataaaagtaactttttacaattagtgattaagttctcaaagccatttgaagataaagcaatctgtgtgttattttgactttaaaatatagtaaaataaatattccttgttaagagttataaaaaatgtttataaagtattaaatataatcaataagattctttatcttgttttgctctcaaatcataaacatttagggcttcttctgcagctttgacaccagataaaaccattgcaccaaaagttggtcccattctattagaagaatcacattcactcaattccataccagcaacaatcaaacctggaaaaacttctctagtattcttcacgattgaatcttcagctaaattcatgtctaaacaacccatttgatttcttttaatgtaaccttggctaactaatctcttgacacaaaaagcacccattggaccatcatgtcctgtacatgaaataattaatttggaattaatagtgtttggatccatacatgattgatcatcatgatgcattgaaactaaagtccaattagtaacaacaccagcaactctaataccaccttctgatgtttttctagtaatcaaatcttcaacacaagttgcattgaaaagtttaacatttggtaattctaaaacttttgagcataatttagtaatgaaaagtgcagcatgtttaacaacaatgaaattaccttcatcttcataatcaatacctaattctttaataaaggtatcagctggttttcttaaaaccattgaggaaaataattgaccacctaaaaagcaacccccaccaacagcaacatttgcttcaacgatagcaatctttaaatctggtcttgattttgctaaaatatatgcagcagtcaaacctgaagatccggcaccaacaataacaatgtcagattcagcatatttatctaaatcagcaaagtatctttttgtcattgcacgggaaacttgtgattctctgattggagcaaatttgaaagagtcccaatcgtaaactgcatcagtggcagttgctacttttgattcatcattgaaaacatttgcagttttcatagtgattggagtttgcgtaattgttgttgtagtactcctttaaaaaaataataggtatatttttaatgttagtgatttgttctctatgttggaaagttttgaaaagcacatacatcttatgttgttttgttttgtgttattttatgaagttttagaagtattagttaaataccaaaaatgatttaacatggaagcatgcctatttatatacatataaaagtatttggattttgcttcttagctattttggcgaaagaatcaaaaggctggatagttttgaatttgaaaatgctacattactatcaatgaatccaaggtgtctagacacttacattattagtgcaattatggtttaatcaattaaggtaaaagagtggttattcagaaaaaggtataaaataaataaataaatataccccggagaaagcaaagttcattttttctattgttaaaatgcgatgattaggagatgactcacccgttgagacatttttcaatcattttgcacccctacaactatattttttcttgaagcacatgtgcaacaacgatctgaggcaatactactacaatataattagcataaatctaaactaaaaataaattcactttcattttaactttttccttcttctttgttgtcacttttcacaaaactccgaagtattaaaaatcactcaaatctcgtgatttaaagccacgccatttgtaagattttactatatacttctatttgtagtgaatagtgtaagaatttgtacgtaggtttggccagataagtctgaattacgtatctgaattatgtagtgcaatacaatattttacaatttgacaaaaaaagcaccaaaaaaagcattgaaagaacatttgaaattgactcaatgttacaatttgtggtgctgttataatgatgattcaatcaagatgaacccggacattgcaggttctcttattttcaaattgatagccacatgtacccgtgtctaaccgaaagagtcctcattgccgcaaatcttttgaaatgttacatcttttcacaaaatagcttctttttgatctattttaaagtttactgaatgtttgctattgtttcgatggccaggagcaatccactagtatcactttaaaaacagacatatgtcaccaactttaaaatacctttcattattctatatctgattacacagtaacaacaagaatgacaaccgcaaagcaacaacaaaaatcaactgaaaagattacattttccttaaactggggaccagcaccttaccatattccaatttatcttgcccaaactcaaggttactttaaagaagaaggattggacattgctattttagaaccttccaatccatcagatgttaccgagttaattggctctggtaagattgacatgggattgaaagcaatgattcatactttagctgctaaggcaagaggttatcctgtaacttctgttggttcattacttgatgaaccatttaccggggttttatacctaaaatcaagtggtattaccaacgattttgaaactatcaagggtaaaactattggttatgttggtgaatttggtaaaatccaattagatgaattatgtaaatatcatggtttaacaaagaatgattatactgctgttagatgtggtatgaatgttgctaaatatattttagaaggtaagattgatggtggtattggtattgaatgtatgcaacaagttgaattagaacaatattgtaaggcaaatggtcttgatgaaactgatgttcaaatgatgagaattgataaagtagcttgtcttggttgttgctgtttttgttctatctgttacatttgtaacgatgaatttttatcaaaaaatgaaagtaaggttaaggcatttttaagagctattaagaaagcaactgatgatgttataaatgatccaaagggttcttggaataaatatgttgattttaaacctcaattagataacgaattatcttacaaacaatacgaaagatgttatgcttatttctctgcatctttatttaatgttcatagagattggaacaaggttactaactatggtaaaagacttgatattttaccagctgattacaaaccaaactattcaaataattacgttccaggtgttgaacctaaggaagttgatgatccacttgaagctcaaagattgatggcaattcatcaagaaaatgttagaaagaatggtggattttctagattagaaatttagattatcaagattgttatttaattttataattagttattgtgtttaacctcatttttatcttcatcaattatatttcataaaagactcacataaaagtaaaattgtttttgagaataaatcatttgaagtatatgcagtattagaagtagtattgatgtctagcatagtaaacatgtggtgttttcgtatataagtggttgaaagctgtactagttaaatgtcttatattaactataaaagttacgtaatacagttggtggctcaacttctctttgtagtggaagttcacctaataaatacttggactatttccaatattatttgtgttctgtaaaaactggatatgtttggctggatattttaattgtttaacagtgggtcttgttttaaaagagtttctagttgaaagactgaaaattgatgtgtttttgaagaatgattaccaattatttaaaagatttgttgattgttggagacaatcgtaaaaaattcagggttcctagtctaagataagcttttatttttttcagaaatcaaattgaccttcaggaagccaatgaaactttcttatctcatcataaagttattgcttctgaatttggtcataatcaaattacccatgttgaaaactatgctgtggtggagaatgtgtctaatattgaaagaagtcaagctttccatatttcctttaatattatgcagaggctgaatcaaaatctatgttttacaaaaacacataaacattgatcttatttttaataatttagtatggccattaggcagttgggttgttttaatttttctttagtattttaattaccaaggtttgttatttgaaacatgctgaattcacaaaagtaagttgagttgaaaaggattaagaactgatgatgttagaacaatttgaagttgaaactattaatatgtaaatttacttagtctttagtttttcaactttaagcttcataataaataaaagatgcactctctaatatttttttatagtataattgatctacttattacttgattagcagtaatggtgttaatttaatcaaacttaagagaaaaagaagtgttgataaaattgctaagtaaattgcctacatgatttctcacattaagaaatttctacatagtaattcttaccacagtaaattagtgttaaattaacagttttaatggatgttgtttatggcttatacacaagatatatacttctagttagttggtttcttatagaaagggcgctagagattatgaatatcaaaatagaatgttcaaattgtttttattgatatcgttattgaaagcttgtttctccccatagtaaattagtatgtcaatctaacaatttttttgttgatttcctccttatcatctggttcttttacatgttgtttgtttgatcatttccaatatgtaaaaccaagtttcattgaaaaatgtcttttattgataaagttatgacatctcaaagttgaaattttgtgaattttagctttctggttgttataataatgattttaagttcgtgttaattagatgttgtgttattggcatattttattaagtaatatgtaaaccactttgttgaagattaaaaactgatagacttattccactttcaaattttgtaaattagtatggcagctgtatcgacttatcaaccacgcagccgtttagctcagttaaagcactcgttggtttgtatatatgttctgatcattatgtattaaatgtcatttaaaaacaccttttattgataaagttatgccactttgtaattttattttttgaaattttaaaattagttttttattacttgttctaatgattttaagtttgtgttaattagatttttgtaatagtaagtgttggtgattgcaaataagtaagtcatttagattaacatttaaaactgatggacttatttcactttcaattttcaaaaattagtatgggaacgtgcaaaatgtcaactgcacatctttttgaccaagtttaagcacttatttatctattacctctttctgatagttgcgtattaagtttcatttcaaaagacccagtaataatgaaattatggcaattcaaaaattaaaattgtaaaattttctaattgactttttaatagttgaactaatgattttaaatccgtggtagttggatgtggtatcatttgcatgttgtaataaacatttgatgaaccacttcaattgatattcaaaactgatgaagtttagttgatgttgtattttgaaatttagtatgacaatttagcaattaaatattataatcttcatttttagcaacagtttatcatgtttagctaattgagagtttctaatttcaatttagcaagttgaagttgatttgattaataaatgatgtagttattaaaggttaaagttagcattgttaataaagtcattttgtatctcctttgtttttcaactttaagcttcaaactaagtcaaggttgctttatttgatttttcttatggtataatgggtctacttgtcatcaatatatgtttattagtgtcagttcaaagagactcaaaggaaaaagaagtgttggttaaattgctaaataaattgcctacatgaattctcactataattttttctcatagtaattcttaccatagtaaattattgttaaattggttctttcaagtgacaattatatgtgttatattaaagcttttaaacttgaacaaaatgcattcttatactacttgtattggtgaagatgaatatgtaattagattgttgaaattaattgtttgaaaattagatttttgagtttatttcactgtagtaatttagtatgttatatcaactttcttttctattaatggcttatttattgtaaatataattttaaattgttattctatatcacaaatgggcctttagtgatgatatttaattttttaaaaataattacaaacttattaataggtagtttatcaattgatactttgtcattctctacaatcactgtttttcactttttaggtggctcgtcattttataaatgttgccatatcttcttcaatcaagctctttttactattctttgacttggatattgatatttagtacaattagtatcctatatatgcctattatcatttaaatagccttcatataacaagaaatcatcaatagtagacaaaacctcttaatatatgacataccccatgttgtcttaatatcctcaccatagtaatttttcacatagtaaatttagtatggtaaattaacagttttaatggatgttatttagggcttatatacaggatatacagttctagctagcaagattattatacaatgtctattgaagaatcagaatatgtaattactttgtccaaattatttgtttgaaagttcaaatcttcaactcacttcactaaatcaattcaattatcaatgtctttgtaatgacctgcaactgttctcgtttgtttatttagtcattcataacatttagtagtaattattattaaaaaagatgttatattggtaaagttatgatgtttcgaagttcaatttgtcacaattttctaattaactttttgatagttgtattgatgactttagtttcaagttgattaaatgttgtatcattagtgtgcaataaagaagaatcagcaagctgtgttaaataatattgcaaactaatgagttaatttctctttccatttcctaaatttattatggggaatctatcatcatatcaaccacacatcggtttggttcagctataacacatgtttgtttgtttgttcataaaaacgatttaatgttaactttcatttaaaaagaccttctattgatgatattataccaatttgaaaataatttttttaaaattttctaacagaatttttatcagttctaacaacgatatcatattcgtgctaactagacgttgtattagaatgtttcaataatggcctatagccaaaccaactcaaactatattcaaaactgaatgaaaaaagtccttctcaatatttatgatttagtatggcaatttagcagttaaattgttttaattttttttctgtattttaattatcaatatttgtcatttaaaacatgctgaattcataaaagtaagttgagttgaaaaagattaagaactgatgaagttagaactggttgaagttggcaacaaaatatgtcagttttctaactcctctgttttgcaacattaagcttcaaactaacttggaggttaattgttagcatttttttatagtgctatagatccatttgtcattagaacatgtcaattagtagtaaaattaggctgtacaattgatgaatctgtaaatattggatagttattcggtggtttaaattttatagtaaatgatttactcacttcaattttagatatttactggaagttaaacaatcaattgtgaaacagtttaaaaaatatggtacaattattggtatgatatgcttttgtagtaatgatttaagcagataaatgttaatattttatcaattgatgcaatctataatataaataaaaaatccaaactaatttcagtgaataagaataaaaaattaaacgatgcaatgtttaagtcaatatgctagatgaatttttgatgagtgaaccatgtgaattagttgatggaaaattagataatgaatttccatgatgataactaataaattgaaccatttaaagataaacaagtttaaagctttttgataaataataaaacctcacgataccagttgtacagttaataattttgactaatctattattccacgagactattgattatcatatgggtcatagatggtcatcctttcaattcgtccataaagaaagagttgtcaataaaacagttaattaaaatttattaagagaacttccctcacatagtaaatatttttcaacatgttaattgtcagagtgttcttcttagtggatattggttcttttattaacaactggttaaatacattcataattaagtgtaatgaagtgtgatcaataaaagtgatgttgctaatttaggcttccaaagatattatttaaattgatgtaatattactcttattaattggaattaataggatactatcaaatgaatatgtgattaatccattgggagattaatagcacaaatttaataacataaatcccaatattacatataactgattattaaaaatgaaaaatgaaaactattcaagaatgaaacgaatgtattagctatataatgtgaagttaaattatccaaatctcttattagtgtttatattgaggattatgttagttcatcatcgagtccaagccagataataaaacaatactggaatatatcaataaattgagatgcatctagtaaagtaatattggggcacacgaataaaatgatatacaaaaaagacacatcgattattaatggaatataagtaatgaaattttttatttaagtgatttgtctggcaatgaacccattactaataacaaaaacaacaacaacaacaataatagtaatgataatttatatagctaaaagaaagcatttagtctattaaatttaccaatatgcaatttttgttatatttactaaaaatacatgctctttgtgttcaatactagatgattctattttggaaaattcaagcttaaaccttacttaaaattcagtagatttagtatctgttattttcattttaattattgattaatattgatatatccaactattaactcagatatagtaatattgagatggtcaataacaacacccaataatactgaatattattataagaaagaatgatctacatgatattatttctgttttatttccaatacactaatacagttaagcagtttgaggtttagcataaaggaatatttaatcaagtatctaggttcaaatgaataaaaactaatacaattaatagttaagttatgtaaacataaattataatatatgtactcattcccatttataaatgtaataagttaccaactgaaacaatattcaatagattgaagtatatctgaagcactaacaactaataatagatcagtattaacaaacattaatagtaacagtttattctttattctgtgtcaaccaaaacattttgaaaaactcctcgctttttcggctaaacgtttattttttattttggatgacaatcatttttcgggtaattttggttttcggataatgttttaaatttttatttttttaactttttcgcatgagtgatgactttagccgaaatacatgttatacatacgacgattagccgaatattctattttatttattaacgttatatggcatttaagaaaagactaagaaagtcagcgaattggcaaaaaaaatttcccaaatttgtatgaggatgccaagtcgcattgccaagtcgcattttctgacaggtgccaaatggcgtgtttcatgcgacttggccagatattgctgtagagtagttagatggtatgtagatggttggttgtaatggggttgatgagtagatgaaaactgtctacttcattagtctctaagtggtctggttgtcgagatatagacccctaagtacgtagaggaggggggtgtagtttagtatgtagaagggttgtttcttgtagttagatacatggttgtgttctcctgtgtctgtttagtagtagtagtgtctaagatagtaaacatgtggtgtgttcgtagagttacaggtggttcaatattatactagttaaatgtcttatcttaggataatttactatggaaatttgaaaaatttattataaaagttacgtaatctagttagtggctcaacttctctttgtagtggcaagttaagatgataggaagatggaccatgtgtaatggtatttgtgttctgtaagagtagggtgggtttgtctgtgtggtgtgagtgttcaagagtgggtcttgtttcaaaagagtttgtggtcgttgagttagagcaatttaaagtggcaaaagttggatttttctaattaactttcaagtagttgtactaatgattttagattcttgttgattagatgttgtattagtgagtgtttcttactggaaatatgcaaactgttttggtatttgtgttctgtaagagtagggtgggtttgtatggatgttgtgagtgttcaacagtgggtcttgttttaaaagagtttgtggttgttgagttagagcaatttaaagtggcaaaagttgggtttttctaattaactttcaagtggttgtattaatgattttagattcttgttaattaaatgttgtattagtgagtgtttcttattggaaatatgcaaactgttttgcaaaagatttgaaattgatgaagttatttctgtttcagtttttaaaatttgtatggcaattttagcaacatatcaacatcacatccgtttgactcagttgaaccactcgtttgtttgttcgtgtttgctgatgatttctgtgtaggcttcatttaaaaagacttcgtattagtaaagttatgccaatttaaaattgaaatttttagtattttcaaattgactttttaatagttgtattaatgattttaacttcaaagtagtttgatgttgcatcagaaagtattcctaattgcaaattaataaaccatttgagttaatattaaaaactaatgaagttaggttgatgtttgttttttgaaaattagtatggtaatttggcaattaaatatttttatatctagttttggcaacagtttatcatgtttagttaattaaagctttctgatttcaatatagtaaatagaagtcaaaatggttaacaaccgatgaagttaaaactgtttgaagttgatcatgtatgaaagtgcattttctaactcgttggtttttcaactttaagcttcaaactatatcagtggtgcattatttgatatttcttatggtataatgagtctacttgtcatcaatttatgtttattagtgtcagtttaatcaaactcaaaggaaaaagaagtgttagttaaatcactaaataaattgcctacatgatttctcactattaagaaatttctacatagtaattttcatggtggttagattagtgttaaattaacagttttaatggatgttgtttatggcttatacacaagatatatacttatagttagttggtttcttatagaaagggcactggagattatggatatcaaaatagattgtctaaaatgtttttattgatatcattattgaaagcttgtttctccccatagtaaattagtatgtcaatctgacaatttttctgttgatttcttgcttatcatctgatacgtttatatgttgtttgcttgatcatttataatatgtaaaaccaaatttcattgaaaaatgtctcttattgatgaagttatgataattcaaagattaaaaatgtaaaattctctaattgactttttaatagttaaactaatgattttagtttcttgttaattggataatgcatgattaagtattattaattgcaaattagtaaaccacttgagttaatattaaaaactaatgaagttaggttgatgtttgttttttgaaaattagtatggtaatttagcaattaaatatttttttttctgatttcaacactagtttatcatgtttagttaattagtaccttcttaatttaatgtagtaagtagaaatcaaaatta

SEQ ID NO: 2 - DNA, 74599 bp, Pichia kluyveri
  >Nicaragua_Y298_000010F_chromosome
tgtacgttgccgtgaagaatccacatccaagttccggaattttaaccggattccctttcgatggtggtgcaaagaattgcacacgttgaaacggagcttccccatctcttaggatcgactaacccgcgtccaactgctgttgacgcggaacctttccccacttcagtcttcaaagttctcatttgaatatttgctactaccaccaagatctgcactaggggccgttcgacccaggctcacgcccaaggcttcgtcacaaacccccacgcctgcctactcgccaaggcatcacgccatggcggcaaagtataggtaacacgcttgagcgccatccattttcagggctagttcattcggccggtgagttgttacacactccttagcggattccgacttccatggccaccgtccggctgtctggatgaactaacaccttttgtggtgtctgatgagcgtgcattccggcaccttaactttgcgttcggttcatcccgcatcgccagttctgcttaccaaaaatggcccactaaaagctctgcattcaaacgtccgcgttcaataaagcaacagggacttcttacatatttaaagtttgagaatacgctaaggtcatttcgaccccgagacgtctaatcattcgctttacctcataaaactgatacgagcttctgctatcctgagggaaacttcggcaggaaccagctactagatggttcgattagtctttcgcccctatacccaaattcgacgatcgatttgcacgtcagaaccgctacgagcctccaccagagtttcctctggcttcaccctattcaggcatagttcaccatctttcgggtcccaacagctatgctcttactcaaatccatccgataaacatcaggatcggtcgatcgtgcccgcccccagagagagcggtccgacctacgttcactttcattacgcgtacgggttttacacccaaacactcgcatagacgttagactccttggtccatgtttcaagacgggcggtattgcgccgttgtgccagcatccgagacgaaacgagtccgccgcagccctcggtccccatacgcagcatctacaaaaggctataacactccgaggagccacattccaattgtccttatcctgcaacgaaaaccgatgctggcccaggaaaaacccagagcgccgcccacgagaggcaacgatgcgtaaatcccatgtcgagcccaatacccttccctttcaacaatttcacgtgctgtttcactctcttttcaaagtgcttttcatctttccttcacagtacttgttcgctatcggtctctcgccaatatttagccttagatggaatttaccacccacttagagctgcattcccaaacaactcgactcgtcagaagggcctcacaggtgtcgacatgcacgatacggggctctcaccctcagtggcaccctgttccaagggacttgcacacacgtctaacccgagactccaacctgcaatttacaactcgcacactaggtgagatttcaaatctgagctcttgccgcttcactcgccgctactgaggcaatccctgttggtttcttttcctccgcttattgatatgcttaagttcagcgggtattcctacctgatctgaggtcgagcttagttaaaagttcggcggccaaagcgtgctaaaaagtttagttcacttcgtccacgacgttccatttcgaaaaaggcatagcctgttctcaactctgcttgcgcaagaaggaaacgacgctcagacaggcatgccccatggaataccatggggcgcaatgtgcgttcaagaactcgatgattcacgatggctgcaattcacactaggtatcgcatttcgctgcgctcttcatcgatgcgagaaccaagagatccgttgttgaaagttttgttttgttaaaacttaatgacaattagtattacaattttaggtgtttggtgcgctcacatactgtagaatcaaaatcaaatttgtagtcaagaactggtacaaattttaaaactgatctgtgggaaaaatcaaattgataaatttttaattacccacaaaataaagtttgagtgggaaaaattactaagaactagtattttttgactactcactttacatatatccaccggactgcgtaatctagcgaaaaattcatagggcgtactacattcatttcgaaacctatttttttactttgaaattcgctagtcattttatttttcctcgctgctatccaactttgcacataccttagctgagccgctaatttagtagtaaaccatgatatatcactttcaagaatttacataaatattacatgtgtattaagtacaattaataataatacttattaatacgataaatagtcacttacactaatgaatacttacaaatttcagaaaaagtatgaaaaaattaatattttactatgttaatcaatactaaaatttagtctaccaaaaaaaaataatattctcagagtgagagtcttgaaattttgaggtgattaaaaattttaaaaagttttctcaaattgaaaaaaaagttcttcatagacaaaatttttttaaccggattttgaactttgaaaaaaaaagttttttaagttatttgcggaatttgttaactcaaataaattttattaacctttctcagaaaaacttatttcatttgaaaataaaacattttgaaaaaacaatcgttttttcgggtattacagaaaacatctgaaatcataacatcaatatttcggctaagggtaatttgagtgaaaattcaccacactacaggtggtattttgattgtttttatcagttttcccgttaattttaacactgtgtcctgtcttcatctttacgcttttccctacttattatatgattttttattttgtctaaatttattaaacaaatagaatgaagatcactttatgataaatgaaaatacttcaattaaaattataacacatgttatgcaaaataaatactactacactgatttatccattcaaatacaactaatatgcaacttgtatttactatgtggtactacactgttcaacaccacacccaccaagcttttattcaaattaagaaaatccatatccgagaattcgcgtagtcaaaaattcaatttatcaaaaatagccgaaaaaagggcacttttttcaaaatgttttttttttcactgagtgcggtaatcttgaagctgcttacattgatttcttagtaaatttcacttaactaactttattattcatgataatttattgatacacataatgaaatgttttggctacaaaatgccctaaaggaaagacttcctcattttgtaccacccattgataccatctttgatgattttatgctagataatacttacagaaactatgaaataccagataataaagaaagtacatttaaaatgcatgatgaagagaaatttgaacagtatattaattcaatcaatgaaaaacttggtgagaaagtatatgcaacatacccagaactaaaccatttaggtataatattaaatgttgaaattggatacttaatacatgtacgttctattatcaaatctgaagaaaactttgcatttgtcttaaatggtgtttcaacaaatgtaatacttaaatccataattgatgcatgtgattttggttatagcaaaccatcagaattaagtttaattaacttatggattagaaacttgtatgaagaatctaatataaaacttcaatgtaccagaaaaaaatacagatttgatatagattttaagcattcttttgatgatatactttcaattggtaataagaaacttggtctattaaatgtttattgtaaagctgatccacttcttcctatctataattcatttcaatgtgatctttgtttacgttcatatttgaaaagagattcagttattcgtcatatcaattctattcatggacaagacattaaaattataactaaattttatatttcagaatcaagtagtcaattatttacaagaggaatgatgagtgtattaatgagtgaaaattatattaaacggaacaagctaaagtcagaaatattagaatcttcttcgaaaaattacaaacaatacaaagtttcaaagatatcttcacatgatgaaatgtttaaatcaaattatattgtgaaatttattaacagattagaaataaaggattattattattatctgaatcactctaagattgtttcgaattttattaaaatgcagatttttttaactgattctttgacagatctaataacaatatattcaaaagcttataaatataatgaaaattttacatttcataagtctaaagttatgaaactatatttatcagaaacaagcaatcattcttttaattttgttaaactaagcaataataataaaatcagattatatgctgaaaacatttccaaagctatcattatacttcttatggcatacaatgttgaagacaaattaattttgagcttttgtgaatcacctaactataaaccattatttaattcttcacaaaaattcattattgaaaaacttctattacttattatgagaaaatgtaaaatagaaacctttttatttaaattcaatgttacaagcaatactgaaaatgatgatttattgaaactatgggatttgataagtaatcttttcattaatatttcaactcaagaaacctcagaatttacacctttacaaacaatatttacattttctatttgtaattttgataaatcctctaagacacttacatttttcaaaccatcaaggagaaaagttatatttcaatctttactatatatcataagattaagtttcttaagcaaattaaccaacaaaaatgatgaaaatttcactttgaaacttggtcaggctactaaaactggagaattaagaaaaattattgaaaaaatgtattatcccaccttatactattttttaagaaaaaaatcatacataatgaaaccttttttcaatcctgaaaaatacacttatgttcatccagttttacttaaggataaattcattggatgtaaaatattaggattattcagtttaaacataatgatagagagaattgagtctttcttaaattcagaaattgtatatgttaaatcattagctggtctaaatattgaaaatgaaattgttaaaaaagaattccaaaagtttcaaagtaaatataaacgtcaattagaagatgatgaattcaatggaaataataatattgatgaaaatgaaaatattaaaagatcaattgcatgtataacttgtttattgataggttatttagctttaactagtaccccattaccacaatttggagagtatttaaatttagacattaattgttttaagtttatgaatgacgcattatacattgagatagaatcagagaatatttgtattaaggaagaatcaatgattaaatattttactaaatatcttacattgagaaaatatatgatgaacaaggaaccaaatttagataaatccaaatttttcatggatatatcatatgttaaatcacaaacatttttagatttaatgtcatgtaaatatactgattacaaatacttatatgtatttttaaaagaggcacaggcaaaatgtagaaatgaaacaggtaatgaaggtaacaatagacctaattggttatcattaataaagaatcaaatgagagagaaaagtgagggctttttagttattaatttgaaattaattgcaccagaatatcaacaatttgtacttaataaacaagagaatgtaattcctgatcaaaggtcatatatttcatgtgatgatgaaattaatttgaatcaattaatagaaaatggatttttcgatactagaattgatgatgacgagaaagatgatgttgatgttgaatgtgatataacatttgattttactgaatattcagaggcagatttcaatatgattgataatgactatagtgaaatgatgaaatatattaaatctaaaaattcaaattttgctaacaaaagaatgaaaatatgatttaaatttaactttttaattaacctatttagaaaaactaacactgtatacattacttacaagaaatatttatagacataaatttaacaaaatcatttcttaccctttttaaccaacttcttcttaacatgtttcttcattttagatttacgattttctctagcagcttctttgacttgttgtttatgtaatttcttttcatctttatcttggaatctttttaaattgtttggtttatttttcctttcatcatcactataaaattcatcgtcagaatcatcttcatcatcatcgtcttcctcatcagaatcttcttcgttatgatcttcatcctcttctgcattttctccttcatctttatttattttcacactccccactaaatcaactaatgtatctatatcaccattactaaatttattaaaatctctttcttcaatattatgtaaactactaaccaaatgtaaacttctgaaaacttcatcattgaattcatcatcctcggatgattttaatgataaagtatttaaataatctaataagaattctttagtttcttcatcatctttattatcatgttcaaaatctttaaataagatatcatgtggtgttataataaatttaaatatttcacgttcaggataaacattaattttctttattctactaaaaaaatcattaacatttttaatatccattcttaagaaatccattgccattggatgatctggttcaacggattgtgaaacatcaaaaacgaataatttatcttgatgtacaattgtattatattcacttaaatcagcatgaactaatctacatttttggaataataatctcattaatattaacatttcatgataataatgaataatttcatttaaatctttaaaatcatgatctcttaattttggtgatggttcacctttaccaattgttaaatattccataactaaaatattttctcttaattcaataggttgaggagaattaattaaaggttcagaatgtaatcttttcaaatttctaaattctttctctgcccaatttttaaccatttgtcttggatttttagattgtttttcaccaaatctatgttcaccaacaacatatcttgttctatccttgaaaactaaaattgaagttttataaattttaactgcaaattctttacccgattgttcattttctgaataataaatatttgcttctttaccagttgatacacaaccattaattttagtaattgtaccattattgaaaattctaccaaggaatctcaaagttcttggatctaaaacttgattaacagttgcacgtaatgctttatctcttgtaattctatgtttagcaaacatatcaagattaattttatcagaataacgttccaaaatatctgccttttctcttgcattagatgtgtggacactattattgaatgtttgaccatttccttcgtcatctgagtagtctgatgatgacattatagctagttattttataaaagatgattaaagtatatttaacattggaaaaaaaaaaatttcatgttaaggatttaaaattttttttactatggtggcttacttactatatacagttaataccttaacatttgattatctataaaagagatagttatttctacaatatataattctaattctaattttattattatttttatccattcataaatcatttcaatttatctaataaatcaacaaatctagttccaaatccaaaacatgtacgtgagattctcttacgcaaacgtaaatagtaactcaaaacaattgccatgaaatatagacggaaacattcactaattaagatagtaacaacacaaacaaagatttcgtaaccttcacttgcactttgttctgataatacatcagaaactctcttatttaacatatgactgatagttttcttaattgatgaagatgatgatgaagtagatgatgatgaatcagtttctaaatattcctctgtaagccaaagattagccaaataaaccataaacagattacctgtaaagaaatcaataaagtaaaatacaataaatgcagcaataaatttaattgttatcatattttcatctgtattaagtgatgtattagataatgaaaatgaagctgttttctttaaataagtataacatatcattgttaaaataacaaataatgtgtttaatagataatacatccattgaatgaaatttattggatgatttgtgaataatgaaagaagtccatagacaccagacattttatttatagctgtgaagatgaaaataagttctacccccgtatgaagtggtagtaatctaaagaacatcttcggtagatgcctcctcagttgtttaagttccatgatgtctgtctacgtgtagtataagatatttcaataagataaagtatagtaaatagaataacaacatgaattttaatacttgtcgagaagtaatttattaagtacttcatatacctttcttttatctttcttttactttggacaagacaccatgtttaagtttataggtaaacatctctcagcggcagagagaccttctagactttcacttctagacttttctaaggcagagacattcccaagaattcaaacaacttcagatgcaacattaggtggattttcaactgcatattttgaaccttatagagcatcaaatgaaagtaaattaattgcacatttccatggtaatcttaatcaaacattaccaagaggtgaaactaaagttagacaaagtggttgggcaatgtttaaaacaaagaatagaattcaagatccaaatgcacaatttaaaccattttatttatttaaaagtcaagcaaatttttggtgggattggtcaccatttgaagttttacatttaagagttatgaatttaacacctaatagaaaatttatggttaatattcaaactgatacaatgtcaagaactgatttatatcaacatagattatttacaaatagtaatggtgataacacttctaataatccaatttgggaaaatttatttattaatttaaatgaatttgtacttacaaataggaggcaccgtgcaagttcaatatcaatctgaatttgaaaaggatagaataaaatctattggtttatcaattgctgatggtaaattcggtccatttgaattattaatagataaaattgaagtattgtcaggttatgactacttaaaagaacttgaacacgcaagaaattctaaagaaactttattaccaactaatgatccagaaattaaatatattgataaataataataataatataatttatctaacttcttttttctttctataaatttatttttaaaactaatataatcaattattccatgtaaaatttaacttctaaaattacaattaaaaaacagtatattacataaaaaaaagcaaatctaaaatttctatatcaaaatatatatcatatcatatcatatcatatcatatcatattatattatattatattttaattcgtttattagtggtatcatcaccatctaaatcaatatcatgtttagtattgtttaagatcaatgaaactgaaagttttttactattatttttcaattctttattatcattatccaaattaacagtttcatttccatgttcattttcatcattatctttctttacttcatcattacttgttttcaactccttaacgtcatctttatcattttcattatcattattttcaatttcattttcattttcattttcgttttcattttcatcctttttatttctatctatattatttgtactactttgatttaatccactcatattaaaattcatattattaaaactaccatttctactactctttgttgaataaacaccagattcattaattttatatattggataccaattattattatgttgctttttagatttattattattattaagaatattattattggtattagtattagtatttactttagtatctttatcaatatctgattcttcagttttattaatatttgatgaattattagttgtaactgtagttgcacttgttgatgttgtattattattaataataccaacaggtgaatacatttgactcgctgaatattgtctacttaaattatttggatcaatattaaaataatttgttgatgttgattgataatattgtaaaggtggtggaactggtgttaaattattattgacagaataattttgtggtggtggtggtggtggtgcttgttgttgttgttgtgaatgatatggtaatgattgtaatggatcataaacagattgatttcttgatctattagatgatgcagatatactataccttacatctttttgagaaaatggtgaatcattagcagaattttgtgtagggttattattattattattattattattattattattattaagaattgaattatttgaaacattagaattatttgaattatttttttgaaatgtatgaaatggaacattataattagttggattagaagttggaccaatttgtgttgatttaatattattttgattataaattggaattctaactaatgaacttctattcattgatggatgtttaggtattaaatgtgatgattcaattgattcatcttttggtaatttcctattatcatcattatttgacatttgagattgtgattgtgattcagatcttgattgtgattgtgattgtgattgtttatcatcatgattagtttgttcaatagctaatgatgaagcttgatgtgattgatgataattttgttgttgatttggaagttgagattgaggttgaggttgctgttgttgctgattttgttgttgtagctgttgatcaaatctagttgaataaataggagttgaaacttgtgatggtggattttgtaattgttgattatattgagaataatcataaaaattgtttgaatgatttacttgaatataacctgaattaaaataaggattacttgttaatgaaacatttgaaggttgtcttggataattaatattttgatttgtattaataaaaccggataaattcccactattttgtctaatatgattaattggatattgatttgggaataattgatttggtatttgaggactattaatattttgaatatttgaattattttgtaattcaaatgaattatattggaaagaatttgtttgatacattaaatatctaatattcatatccctattagcatttctttgtaaaaatttagatcttaaactttcaatatttgtaattatttgcattttacttaaacctgaatcattaatttgatctttaattaaatctaatatagttataaaatcataattaagattactaatttcttctttataaatttcattatatttcattaaatcatcagttctttgaaataataaattaaatttatcattattatcttgataatcaaattcacgattattatttgtgttggtattattattgttattgttattattattgttatttggtggttgattagcagatgttgaattatttgaagttgtatttgtattattttgacgatttggtgtttgatctgaattttcaggttgagtttgagataatgttcgattttgatttgaatttgaattagaatcggtatttgaattggtattattattattggaggtttgattggtgttagtagttggatttataattgctggtgttgaatttgatgtttgagtaggattaggattttgttcaattattgcatgttgattttgttttaattgatggaaaattgttgaatctgttgaaacatttgaatgatattgtacaggtaatggaggatgttgagaatattgaggaggatattgaacattatattgaagatgataagaaggttgtggtggtggaaggggtggtggttgtgggtgtggattattattattattattattattttcttgtttaatttgaggattaatcatatttgattgattgtatgaatcttgttgattattataaggatttgagtattgaacatgagatttagattgagattgagattgagattgattatcatctaattggtaatcatgtattggtaaagatggatgtacacgatacgggggttgattttgattattattttgattattattattattatctaattgataattataaatttcattttcaacgggtaaattaggaggtatatcataagttaatttaaaattattactatctttatcatttgaatgatttttaaaagatcttcttttaattttcaataaaccatctaaatcaccccttttaaaaatacctgaactatgtttaaattcccaaattaatgaattattagaatttaaagattttgattttatctttgattttgaattatttaataatgataatgattttaatgatgatgatgatgatgatggtttatcatttaaattattattattattaggaatttcattatccatatgagaattatcaactttatggaaaccatacatatttaattgtctaataaaggatgaaatatttgcatgtttaaaatattttgataaagattgagtgaattcttcacctgaacgaacgtaaaagtttgaattatcagatttccaccaaattaaattattcattgtaggttcctctaacattgaatataatttacgtataaatgaagcaggttgagattttctgagtgttgcagttgcattagttgttgttgttattgatgatgatattgagataacactagcactattattacgatccatttcaggatcaatagaatctttactttcatcaaccataatagaataatataatgatatgtgatctgacctttcctttcctttcctttcctttcctttcctttcctttcctttcctttcctttcctttattgaatgtactttatttaacctttattcaaagagttaaatagttaaagaggtaaaaggtaaaatagcagaatgaacagccaaccaatatcccgttacagttaagtagcagtgcagtatacactatatacagtatacaatagagatcttaaaagcagatgaacaagttaataataattaaatgggggaaatacactttattctctgcgaattccaacggtttatttataaattactttattactataccacttctacctctgcaagtggtacagatacaccgtcaatcactgctctctcgagtgtgttgtccatggtgatgataggagtacacggtggggaagtgtctcctatgatgatagtattattattattattatcacttattactctctgttgtggggatattaccactatactctcctctaaacaactaactcgatgtcctctatgacttgattcccattcaccatctgtaattaccactatctttgtatccttacctgataaacatagtattttacctttcctttgtttatcaactactttcattgtaaatgaattaatggaaaatccatctcttgatcctctatatattgcctttgatttcatttctaatgatttaatatcaataactgttgatatctgtgctattttctgtaatgttagaattttatattctggtttggtatttgtatttatttcattattactttccatcatcgaattgaatatttcatatattggattaatcaataatggagtagtttcacgatatgttttaataaatgattgatatttaatgtttccattcccattaataaaacatcttaatatattcctattttcaattttatattttaattcaaatgatttattataaattgaattaattgataatggtaataaaaatttaattaatgtttccatttcattaattcccaattcttcattctcattattatcatatgattgtataattggcattaaattccataaaattgtcttctttttgttaaatattatatcaatttcatcttccttctctatactttcactattcttacaaattaatttgaatattaatcttataacatattcatcatctaatccaactttcttaaatcctttacaatataataaataaactataataatcaattcatttaatgtaaattcatcatattgtctatccccactatgatggaaatcactaattaatggccaattacttaaaccttttaatatcttataaacaatttcacctctttcatcttcaagtataatagacatacctaatttattcattaattcttcatatgtaattgtatcatttaattctttaatacatccaaatgaaaatgttgaaattgtaattaattcaatattactcatattactcctaacatgtttccaaaacaacttcttaacatttttcctattactcctatcactctgtaacatccccttatcttcattaacactacctgtattacccatatcgtatactatacttaattacagagataaataacctgtattatactatataaattaaaaatccattacataataataataataataataataaaacctatataactacttgttactcttctttcttctctttctttcatcttgaagtaacttactaccacctacaaaggcatgagaatcaatcatttcactgaaacgttcatcaacttctaatttatcttgtttactagactccatacgtttctctaattcattctccaactctctttgtctcttattcttaaacttattcttcttagatttaagcttttcaagttttgcaatatctttaatgttaaaatgttctaattcacttgtattgttcttattaccactacctctctcctcaatttgaagttcttcttcatctctatctccatctccatcttcatctctcttacccctactcttcttaccattatgtgcttctttctttaattccttaactttttgctttctagcctttcttctctctttctccttcattcttaacttctcaattggtgtaagttcttcctctatgaccttaccgttactattattatcatttttaccattattacttaatcctggtgtaaatgtaaattcaatatcaacatcaccttctatgtcttcttcctgttctttatgaatctccttcttaccaactaattgtttatatttattaatattaatctcttcatcatcttcactatcacttgctaaataattctttaaatctaaattatctaattcaccttgtttaaaagatttacttaatatttgaactctttcaattggtgtttcatcccatgttaatttaggtttactatttcttaatgaatctgttgaaaattcaattggttgataattattaggtaatttattacatttatctctaatatcattctcttcaaattccatttcattagggatataccttaaatcaaagaaattaccactactttcaaattctgtattatcacatttcttataaatttcaattgaactttctaaattattaaattcaataactgcataataatatcttaacctttgtaattgatattttcttaattctgttgaatcaaacccttcatcctctccattgttttcttgaattaatttcctacttgctttctctaaatctatatcttcttcatcttcttcttcttcttcatcttcttcttcatcactctccaattcattttctttctgtattgctttaaaaatttcctttggaggtccatttaattcttcatctgctaatttctccttaccatattcacttttataaatagtaacactctttatactaccttccattggtaagaatgaattaaaggttgcatataaatcttttgaattaatatgatcccaatctaaattaactgctgcaattctatttgttggatcagaagttgggattttttcctctacttcaatatctgattcaatatctgattcgatatctgaatcaatttcaacttcttcttcttcagatgaatcactctctaccatacctcttgcttttgcaagtggatcttcagtgtctaattctgattctgagtcggagtctgattttgactcctcttcttctccttcttcttctccttcttcttcttcttcttcttctccttcttcttcttcttctccctccccctctccttcttcatcttcataatacttatctaaattatcaaccacatcatcacctttaactttcctaccatatttatcaactttagcatttgattttaataatgtaaattcctttttcaattctttcttattaaatctatcatccaattgaacttttaaatccttctttttcacacttctaaatctaggatcagagaacactttactgaacctaggatcatctgctcctctactgtttccggccattgttgtctgataaacttactctataaaatatacctaatgaaaaaaaaaaaatttctaaaataaaataaaataaaaaatttcaacctctctctttctctctctctctctctctctctttattctttacgtgtctttgtttttgtacctttgttcataacactctttctttatatacttttggtatcgattcctataccaaatcatgaaggtctgtacagctctcatctttgccctgctctctgcagtcaatgctctccatttctacgtcaacacagatgaaactaaatgtttctatgaagaattaccaaaggatacaattgcagttggtaaatttgcagtttatgaatttgatgataatttaaatgattatgttgaaaataataataatttaaaagttgaaattacaattgatgaaacttttgataataatcatagagttgtatcacagaaaaattctccaattggttattttacatttacttcattagatagtggtgaacataaattttgtataactccaaaacatacaaattggtctaaaaaatcaaaacatagaattttatttgatttaattgttggtgatgcaaaacctttagttgatagtaaaagagatggtgatgtttcatatcttacattgaaaactaatgaattaattaaaaaattaaataatattaaaagagaacaatcattattaagattaaaggaagcaacttttagagatacttctgaaaatgttaattcaagttcaactaaatggactattattcaaatcattattttaattggtactggtgtatggcaattatcttatttaaagaacttctttgttaaacaaaaagttgtttgattatattgtatagagtgtgtatatcatgaaattttcttcatataatttagtcacatttctcttttcttgtagaatatatactggtatacctccctctctattcaaaatggaattaactaatgaagaatactctcgttatggtagacaaatgcaagtacctgaatttggttcattaaatagtcaaattaatttaaaaaattctaaaattttagtaattggttgtggtggtttaggttcatcagctttactttatttagcaagttcaggtattggtaaaattggtttattagatcatgataaagttgaaatttcaaatttacatagacaaattatacatgattcaaattctattggtttatataagacagaatctgcatttaaaagattaaaattaattaacccaaatttaacaataattaaacattcaattatgttagataatttaaattcaattgaaattttcaataattatgatttaattttagattgtactgataatccaataactaaatatttaatttcagatacttgtattgtaacaaataaaccattagtttctgcttcatcagttaaaactgatggtcaattaattattttaaattatcaaaatggtccatgttatagatgtattcaccctaaacctacaaaacctgaaaatattgcaacttgttcagatgatggagttattggtccatgtgttggattagtaggtgttttaatgtcaattgaatcaattaaaatattaactaattattataatttaaataataatccttataaaccaattatgttaatgtattcaggttataatgataataatggacaatcaattaaaagttttaaaatgagaggtaaacaaagtgattgtatttgtaataaattaacaaaggaaattattaaatcaactaattatttacaattttgtggttcaattaattataatattttaaatgataaatttagaataaattttgataatttgaaaactttcaataatgatgatcaattagttattgatgttagacctattgaacaatttaatatttgtaatttgaaaacttttaatgaaaatgataatataaatttaattaatttaccatatactaaattaattagattaaatgaaaatgaattaaaagaaatattaccaattgataaaactatagtatctgtttgtaaaatgggtaatgattcacgtctagcaactaaatatttaattgataaaggttataaagcattagatctaaaaggtggtttaaatgaatattcaaaatcaaataaatttaatatttattggtaatataatatacataatacataaaactatataattaaatcttcaattataattaatccatttccccatgcacttgcaattgatttattaattgatgatatcttaattggacaaatatcattagaattaactaaatgtgtattatttgctaatttatccttctttaatttatccttaattgaaacatcaccatttttatcaacactataatttaaattaatgaaaaatttattattattattattttgtaaattactctttttcatttgaaataattgaattgaatatggatattgttttgaatcagttattcttgacatttcaataaaattacataatctaattacaccatttgtatgtcccgttattaatgtaaatccattatttaaaatattatttttaaatgattttaaatttgttaaacatgatatttctctatcaattgaaattctatatttattactaccttttggatctttaattgtatatgatttaatactacatggccattcaattgaaaagaaagttttaagactattaatatatgtacaacttctatcgaaaattaattctctattcataactgatgatctataaatttttaatctattcattaaaggaattttcttattattaattgttaatggtaaactaatcatataatcaataaaatctgttgttgaaaccaataaattaattgaatcatcagtttcatttgttggatatgttgatttaatacatgtaattgaaggtaatttagttgaaattaaatagttaattttattttccaaaattgaatattgtccaattagtccatgattagttccaaatataattatttttggtgtaacaaatgttgatgttgttattttaattgatttatcattatttattataatcttttgagaacctgataataatttataatatttagaattattagataaaagaaatgattcatttattttccaaatttcaacagatccattagataatgttaatttcattaaagtttcatttttatcatttgaaatcattgaaaattcaatttctttaattagattatcaattataatttttttattaatttcaaatgaatcattattatattctaaaattgttaaacaacaagaatttttagaaaattctgatatatcaatatttggatttttatcaattgtaactataaataagaattttttattattaattgaaaatggtaaccattctaattgtaatgggaaaccacctgtattatatactaaacctgatcttaaatttttatcagaatatgggaaacttttaacattatctggtggtatgatactactttcttcttgattaaatgataaatcaattgaattattaaatgagaaatgattatgaaatgttttataatcaattgtagataattcaatatcatttaatgaattatagaaatcagttgagaataaattatttacattattttccaatgcattatttaattgtaaatcaattggaatatcagaaataaatccaatatctaaatttaaatcttgaatttgtaagaattgttgtaaagttaattgagaagttgaataattttgataaaattcaatttcatcattactaattttcctatttttatctcttaattcatcttctaagttttctgcaaataattctaatgctggagattttgtttttgttttgtatttgcgtactttggacattggttagaggggcgggggtgtaataaaagaagagaagaggggggtatattattagattagataaacaacaacctctaagttaagataaattacatgcatgtatatttattttttacgtaagcaatattaacatttgtatcttctttcaatatcagtatctataagtattaatttatgtaattaaatactttatttggataatatatcgtaatatatggtgtgttatcctattttattgtgttttaaatcattttgaaaattaaaaaaatcttccaataataatcatcaaagtgttaatgaatatcacactttattaatctttgaaaatagctttttttactttttaggtggctcgtcaaaatcaattaaatgacaattaatctacaactaaacctcctaaatacatgtaacaactctcctataccaaccacaacacataaactacagaacaagacaaaagaaagagtgaactcaagggcagaagaagaagaaaagagtgaaagaagtgaaagaaatgaaagctgagcctgcagggcaatcatttatgacaaagttcttgtcatagtagatgagccttcaattatattaatattacgtaatcatccttttactttgttatgttatagatgttatgttatgttatagatagatgttatgttatagatgttgataataatgatagaaatgactatataatgataacaattttattgtcttaaagcttgatctaaatctgaaattaaatcttcaacattttcaataccaacactaactctaagtaatgtctttctagcattaacatcagtaactgctctccattcaataagtgattcaacacctccaagtgatgttgcatgttggaaatattttaatttagatggtaaactctttgccttttcaatttcatttaattcaatactgaaaactggtgaatgaccacctttcatttgctttaagacaaatgattcagtttgtaatgatgaatgatgaattttatctaatgttggataattattcttattttcaacaagatatttaacaattttagtagctgattcactttgttgtttaattcttaattcatatgttcttaaacttcttaacagtaaataactttctaaattggcaatattagtaccaaggaaaattctatcagttgctaattgaattttaacttttggatctttagttattaaacaacctgctaataaatcagaatgtccaccaaaatattttgttgctgaatgcataatcatatcaacaccaaaatcaaaaggatttgataatggtggtggtgcaaatgttgcatcaactaaaacttttgcaccaattgatttagccttattaacataatattcaatatcatgaacaattgaataaggattttcaggtgtttcaacatgaattaaatcaccttcttttaattgatctaattgatctaaattaacaattttaacattataatttcttgataataaatttaaaataccatgacaaccatgataaccatcaccaattgcaacagttttaggattaaaatacataattgcagcaaaaaatgcacttaaacctgaattatatgcaattacttcaccatctaataatttacttaaaattttttcaactctagttgaatttggatgccctaatcttgaataaattggtgtatcagatgatggatcataactgtcagattgataatcagttgcaggtctaatatcattaggatttgatggataacggaatgttgttgtaacattaattggtggtacaacatctgtaactctatttaatacttgatctgcatgaattgcattggttgaaatacctgtcattttattaatcaattgtatttgtaatctttacttaaaagaagaagtgataactatttaataataataataataaaaatgtgggaaacctctcacttttaaagggctcagagatcatttcctattggtaattgtggctcaatcttctttctttctcttttatattccacactctctcttcttttcattggataaggtactatgtttataagattgacttgaatatagtatcctatctattattatcgtatatctatctctatgttaaagacagatctaggatatataaaccataatagataagtccactctcggaattttccccatagtaaaacccaatctctcggaaattccactaacaaatatttttttggaaaaaaaatttttaatttgaaaaattatcagtttctttaaaagttacttatatgcttataattatactgttcttattcacataaacaatggcaaaaccacagagaaaggggaatagaaaaggcaaattctctaaacaattagaatctgaaaaatcagataaaccagatttcagagatgcagttcttaatgcaagtagatttttaaaaaagaaatcaggtcgtaatgttgatgataatgaagaagatgatgatttagaatttgatgatgaagaattagattcagatgctgctttaggaagtgatgatgatttagatgattatatggttaaaaagaagaatggtaagaatggtaagaataaagttattaaaaatgataaaaaattaaatcaatatggtgaagatgaagatggttgggaatctgttgatgaaggtgaacttatgacactttctgaactttgggatagagatgattccgaattaaaatcattaaataaaaaggataatggaattaaaaataaagataaagatattgtctttgatgataataatgatgcaagtgaagaatcagaaagtgaatcaggtgaagaatcaggtgaagaatcagaatcagaatcagaatccggctcagaatcagaatctgaagaagaagatccatttgatgaaatgaaattatctgatgatgaagatgttcaacttggttcagttatgaaaaatttaaaatcaaaattaccaaaaactgataaagatacttctaaaaaattattaattaatgacaaaactgcagaaaatgaattccttttaccaactcaaggtgattcacttacatttgatgacatgcttgaagatattgatgaaaatgatggaaataatgataatgagaataataataataatcaaaatgaatcattaatacgtgatattgcaaaacattctaaagaattaaaggaaaaatcaaaatcaaataattttgatgatgatgaaattattaataataatgatgaaaattcagcatttgcaattccattacctgttaatattcaaaaacgtcatgaacgtcgtgcagcatatgaaattcaaaaagatcaagttaatcgttggagagatataattgctcataatagagatcaagatgttttgaaatttatacccgaaaaacctgatttagataaaaataatgttttcaaagatgataataatattttaattaatgaattagaatctaaattagataatataattgatgcaagtaatttagaatcaaaagaaactgaagatttatttgaaaatatcgaaactgctaaattatcaaaatctgaaatgatgaaacgtacaaatgaacttagattaatgagagaattaatgtatagaggtgttaaagattctaaaagattgaaaaaaattaaatcaaaagcttatagaagacaaatgagaaaagaaaaattaaaggaacaatcacttatttctcaagcaaatcaaataaatggtattgaagatgaagattatgaagataataatgatgatccaatgtatcaacgtgctaaagagagaatgacattaaaacataaaaatacatcacaatgggcaaagcaaatgattaaatcaggtatgtcaaaagataaatctaatagagatgaattagaggaaatgatgaaacaaagtgaaagattaaaattaaaacaattaggtagaaatgagaatgaaagtagtgaagatgaaagagatttaagtgatttagagaatgatattgaaaagttcaatgataatatagataatgataaattatcaaaagttggtaaaggtgttttagcaatggattttatgaagaatgcagaagagagagatagattaattagattaaaggaaattgaaaatttaagaaaatttgaaaataatgaagattatactgatatcttaaattctaatcaagataatattaataatggtgttaatataacttttaataatggtagaagaatttatacaccatcagcattagttgcagctgaagaggcacgtaaaattgaatctgaacttttaaaggaattagatgaagatgatgctagattattgaaaaatagaatatctgtaaaggaaagagaatctaaaaagagaaaacatagagaagatgaagatgaaagtgaaaatgaggatgatgacgataatgttgatgttagaacttcttcctctaaaccagatgaagaatctgaggaagttaatccatggttagctgaagatgatgaagataattttgatagtgatgaagataataaaagtaataaatctaataaagttaaagttattgataaatcatcatctaaattagataaatcaagtgccaaaattgctaaaaaattatctaagagaaaagaatcattaataaaacaagaagataatttattaaatggtaataatgaagaaatttcaatttctaataaggaaacattgaaaattattgatccaaagaaaattaaagataatgaaaatgtagcagctaaatctgatgatgaatatgagagtgatggtaataatgaagaagatattcgtatgtttaaacaatctgatttaattcaagaggcatttgcaggagatgatatattaattgaagaatttgaacaagaaaaggaagaaattattaaagatgatggagataaggaagttgatatttcagtaccaggttggggttcatgggcaggagcagatgatgaagaagatggtggatggacaataccaaaaaataataaaaagagaaaaattattaaaacaattcaaggtattgttaataaagataatagattagataaaaataagaagaatgttattataaatgagagagttaataaaaaaggtagtaaatatcaagctgataaagttccatacccatataagacatgggaagaatatgagagatcacttagagctccaatgggtaaagaatggacaacaacaaagacacatcaaaagattattacaccaaatgttattactaaatatggatctgttataaatccattaaaggcaccatttactgataaatagttaatttatgtactttagtttaaattattaatataatataagaaatatgacgtgtagtaatgtgataagtcacaaaaagaagttatgaaaagatttgctatttaaatagatgtatttagtatgtttattacggtattttctttataagacatttagataacaatgacaaaattatcaacaaataccattgatgaaatatttaataaattaacaaatgatgataatttgaatgatctaactaaacaagtgttattaagaaataaggatagttttacaagtataattacgaatgaacaatttattaaaaggaatgaatttagtcaaaagagagtaattaattatataatttatcattttaagaaatgggtcagtaatttattcaaaattggtggtaataataatagagatgaagtatttggatcacagggaatggattatgttgattgtgattattttggattaaaatatgataatattgaaagtaatgaatttgatttagataataaggtttgggattgaattaatgatatatttacgcggtttgacatgacatgtttatttacatgtgtttttataagtttctataggacttttttttgtttaagtataagatagtatatgagtttaacaatacctagtacatttgaagatatcaatgagtttataattgaacaagagagaaagttagttaaatctattaagtataatgatgaatttattaaagaattaaaggataatggaattaaattaagtgaagaagatgttaatagagtattgaataaagttaataaagagattaagaataaatataggaatacattatttttaagacagaatagatttcaagttattaaacaaataatgcaatatgagagggacataaaggagaataagttaaagaatattgaagatgttaataaatttataagtagggattatattgaaagtggaatatatgattatgatgatgatgataatgatgaaataattacttcagataaattaaaaatgtatagtgaattaccagattctaatttaattggtactagtgatgttgaattaattgaagaatatgataatatacgagataaatttttaaaaaatataagtaagtatgaaaaagtgaataaagattcaagaaatttattacatattatttgtaaattacgaaatatgattgataataagaatgatggtaatgaggataataatgaagaaattaaacaagagatagaacgtatgaggtatctacttgcaataagtgataaaaagtaaagtaaagtaaagtaaaaagattattattttatatcaatatattattatttttattatactatatctataaaaacaaaatatgaaaatgtatatagatttaaatgttaatactagattaattaatttaatcgaataaaccgaaacccatatcatcatcagattcttcctttgcttcttcaacttcttcttcagcagcatcttcagatgaacctgaagcagcagcaccagatgaagcagcacctgctgaaccagttgaaattgaagctaatttagttgaaccttcagcaattaattcatcaattgatttaccttctaatgaagataataataaatcaatatttgattgttcaacttctgaaccaacagattctaaaagagttttaatatctgaagcagatggtgatgcattaccaccttgttgtaataaaagatatgcagctaagtacttcattgtttgttgaataatcacgtttaagctattaaaatgagcagactatcccttgtaaaaaggaagattaaaatgaaaactttcaagtaaatgctattatcatcaaattgaaaaattaaataattaaattaaattaaattttcatgagaatatgcggaatattattattataataataataatgggaaattgtgagcagttgcccaaaagagtaacgagggttaccaggaaatgccctctgcacacacacgtgacgggcacgtgacagaaccctttccctttcccgcggttattttgacataataaaataaattactcatttaagaaattgattagataaagaaattagacgttggaatttttcattatctttaagaatcagtatcagtatctctttcttttattcactctctatatatatgaataaggagagggatattttcagagattcattacgtgaaatcttcttaggttcagttagtggtgcatgtgggaaattagttgaattcccattcgatacaattaaagttagactacaatattctcaatcattaccacatcctttatatagttcaactttccatgcaattaagaaaacttataataatgaaggtataattaaaggtttttataaaggtttaaaagtaccaattttaggtgcatcaatggaagtttcatgtcttttctttagttataatttatcacaagatttattaaaattatttaataataaaaaattaactgatgaattgaaaataagtgaaaaattaatttgtggtgcatttagtggaatttgtacttcatttgttttaacaccaattgaattagttaaatgtaaatttcaagttgaaaatttaaaaaatttaagtaataatggtagtaatagtaatgctaatattagtcaaattacaagggaaattttacgaaataatggtttaaaaggtttatataagggacattcagcaactcttttaagagaatgtggtggttcaatggcttggtttggtaattatgaatttataattaattattttgcaaatggtgaaaaaaattttaaaccttcaattttacaattaatgattgcaggtgcaggtgcaggtattggttatcattgtactttattcccagctgatacaattaaatcaattttacaaactaatgattcaaaaaatttaacatttacatcaattgctaaacatatttataaaactaaaggtattttaggtttttattcaggtattggtataacattatttaaatcaattccaacttcaagtatgatgtttattgcttatgaaaaaatgaaagaattaattgaataaggaattatttatagacacacgtatttatttatttatttattttctaaaaacattcttagatttagaggtaatctttttaatactgatgttcttattattgatttgattaattaataattcaacaaaagacatcatttcctctttaaaataaaatattaaacctgcacttaaaacactttgtaaaatttttgattcaattcctttatataatgaattaataccttcatttttaataattttataaaataatttaaaactattatcattattatcttcaatttttttcatatgcattcttgcacgaattgtataatatggataagtaattaaaattgcaattaatttaccaaatgatcctaataataatgcatcaattgatgaaattttatttaaacctttaactcttttaaatttaattaataaatttttcaattgttcataaattgtaaattgaatcattggtgatgtaactaaaattaatgcaggtcctaaacctgagaataatccattaattccctcattttgataaatattataaataacttttaatgtacttgaacttgaatttttgttaacagtcattctagtatttgcaacccaaattggattagttataactcttgatacaatacctgcagataatcctgtaattaaactatttgaaatatttaaattattcttggatcctattttaagataattaccaattaaattataaatataataataaacaaaattaactgcaacaataccaactaatgcactctctaaacctgaataatattttttacaatatgataaaataaatttaaaacgtaataataatttttttaaaataatttgtaatttaattaatttaattttaattattgaatcattagtattttctttataattaccaaattcttgtgaaatttcatgatgtaaagtacgtaatgaaagttttgaatcatttgttaattttttaatttcttcattattattattattgttattttcaatatttttagtttgtgcattagtacttaatgtaactaatggataagttaatgccattgaaaccaaacctgataatccaccagatattgcatgtataatactcttgtctgtcattgttgtctaaaaagaggaaaagaagagaaaagaagaggaaagataagaaaaagataaacaaaagtttaatttttaaaataaaaacatgttacgataaagaaaattggaaataatttaactgctacgcttttagttacctattcgggtaatcattatacgtgtttcaccaacagtcaaagggatttgtagaatagtagatgatggtagtagtagaatgtaggtacattgaaatagtatacatactactgacttatttgatgtacctaaccaccatactataatacaggcctgtaaaagcaaaagtccttaataaatataaccataacatgaaaatttaacaaattcgcaaaattttcgatttttaattaaataatttctattataactactacttcactttcatttgacaaaatgcaaccaccgacatcatcattcccatcaattaaatcattttggaaacaagcagttttcttatgtgcagttgcaatgacaagtgcatattttgttaaacaaaatgttacaattcgtcgtaagaaacaatttgttaaagaggcatcatcatatgatagtttaatgcaagaaagagttagagagagaagtggtgaatcaatttcaactgttaaacctggtttcccattagatgatggagttgaaagatttcaaagaaagagtgaatatgaaggtgcaggtttaagttatagatcaagaagaactggtgataaatttacttggagtcatttctttacagattattcaaatgatgataatgaaaagaagaaataatttcttcaatatctaaataccacttgtaaataatatatagtacttaataatagcttataatttcttttttattacttatacataaacaaagagagtaaaatacaaaatacaaaagtaataataataattaaatcaattaattattatttgcaaaataatcagtcatttcttgatctaattctgcaatagttttcttcttctttggttgaggtttcttatttgcaggtcttgttttaattgcagatcttgtaggtttaacaggtctattatttctaacaggtcttgttaatctaccctttaatgcattagttcttacagttggaataatatttggttgaattctagctgcaagtggaacattagttgtatcaacaactaattctaattttaattttgaacgaccaccatcaattgctgcattattaaatttttgaactgccttttgtgcagctgatgattgtttaaaaataacagttgcaacaccagttgatttaccattttcattaaatgcaattgtaattttttcaactggaccaacagcttgttgaaagaattcctaaaataaatgagagggggttgaagataataagttagtaaatttgtatcaaaatgaaaaaagtgaaataaaattgaatttcatttcatttcataataattttttcattaaattttcattatgtattaattatcatttattgttatgtagacattaatggtaaggtatagtaaagcattcattagtaaaggctagtatagtttagttcataatagtatagttcattctattaattatattatattaaattatatttttttttttgtaattcagtctaatcagtaaatcacacacatttatcctcaaaaaaagttccttttcagggaatatttttaattgttattcttattttattcttgaatgataaaatcccacaattttatcttaatcaaaattgatttcagatgaactgaattaagaatcagaataagcaaaactgaatgaaaaaatataattataattataattataattctaataataataaaatgataaaaataagtatcatcatcaataaagcaaatagtaacatagaattaacttgaccatttgttagagaagacatcataaaatttgatgattgaataagatatcaaagaaatgaataaatttctttaaaatgaatagaactagtgactagaacttctgaactaagtacttgataaaataatcaagtaatgatcatagactattaagattaatcaaatctatgaaattgataagaaaccattaaagacataaagccaatatatacctataacccatataacccataaaacccatataaacttaaaaccatacataaccaacagcaacataaaacccaaataaaataaaatgataatataataacaatggaaatgaaatgaaatgaaataaagtgaaagaaaaaaatttgaaagttaataataacatactctaattgaatcttgtttaatatcttttggtaaaccagatacaacaacttttgaagcatttttcaaggaagcagcttgaggattaattttagcaggaatatttgaagtaggaattgcccttctttgattagtgattggtctaccacggaaagaagcaggaccagttggtctaattgatctaccattatttaaagcaactctaccaccacgagcagattttgaagaaatttgaggtctctttgaacctttaattgttcttcttgcaggagtattttttcttgaagatttattattttgagagataatagcatctaatgattgatctaaagcagacattgtgtattgtaggataaatgtgtgtgaatgtgtgattgattatagtatattcaaaagaaagtggtattgtccagggtggcaaattaaatggaaaagtggcgaaagtgggaaatattgaagaaaacagaaaaaattgaaaaaattgaaaaaaattaagaaaatcaaatcgacgcaccgtctccaagaccatcgtcccatcgacgcaaacctataaatataaatatttcaaaccgtttattaccgatctgatggttgaacgttggtggttgatggttgatttgattaatattgatggtaactgtttgattttaatagagtacctagttggaataattgaattgtgtgtatatacaccgttggcccgacttttgtaaattttctaaaaaaaaaaatggcccgcaaaaaaaaatttcaataatttgccaaaagcatttataaccatagtaaaataaggtgaatgtttaagctgttttacgtaagcaacgattacgtaatctgcttatgtaataaaacccggagcggcatttaaattttttttttcgggtttatattttttttttcggatttatattttttttcggattttaaaaattataaaaaattataaaaaattaaaaatttaaaaatttaaaaaataaaaaataataaaactaatgatgtcattgaaattcaagtaataattattaaaactaatgatgtcattgaaatgtcacgtgacttgcaaattttttgaaagaaattcttagtattcaaattatgttggaaattgattaaaagtatccacattgttttgatagtagtttattaaagcatccctagagtaaacatcaaatcttttgtatcccaagtataacatttcctgcaccaaattgttcaagtcatcatcattagcatctattttattagcaaaccagtaaagaaattgttccttgaaaaacaccctaaacttttcatgtaaatctgccctaaactcttcgtataaaccagtcacctttttcctttctacaagtgatcgaaatgcatcaaaaaaagcaacaagaaaaccttcaaatgaaacattagaagattcatttattttgtagaaaaatacagaattgtattgatttaaatattcaaaaaccgatacactttccctatattaaatgttttgttagtatttaattctttatatttgattgctagtttttaaatgaaaatatttgattaaataaaaaaagaaaacttacctaccgaaaagaattcatcagaataaatcttaaaaaccaacaacaataaccacctaacctgtcactgtttaagtaatgttagtatgtactctaaagtatttatttaaataattaattaaaatcgtaatatgttcatactctaccactgtcaatctttgatgtttgtttcttaataaatgataaagtaaatcaaaagaaaggaaaagaaaagaaaagaaaaagaagaagaaaagagagatcaaaaggaattaaaacacttggataaaaaaagtggaaatcaccttctatttatacatcacttttcaaaaatgcggaaatgatcaaagaatttgaattaagtgttttattggttagctgattttccctaaaatccggattttacaaaaaaaaaacaaaaatcgctcaaaaatggccattttttgaattttttttaaatttttcaaggtccgggggtagaaaattagttatttagagccgaaggagattaaaaaacctaaaaaaagctccgctttttgcaagattacgtaatctcaaataatttttttgttgataagttcaaaaaggaagtgttttatcttgtaaaactaactttagcttggtggaaacttgcttgatttactcattgtagaggttgctttaaggcttttttaatcataatttcgatttgtcagaaaatgtttttaaactttgttactttgttttttgaattgtacatttttttgatatttttttttgacttttttttgtaatttgacgaacaatggttttaataactgtatagcattgtagtactttaactttaatattatctctcaacgcatcggaatggaagagcttatcacccacaagactccagcacttgttaatctacaattttatcaattatgcaagatcaaccaagtggatgaagctaatgattttatttctgaaataaaacctctttttattacaattatatcagatcttttacaaccactgaaggaagaaggaaaagaagctgaatttgatgctactgtaaagagatttatcgagctttgtttttcaaagtatgatctaaattattcatatgagttagatcaaaatgagttcatttcatttttcaagaaagttattatatgtcctgatccagaggataaaagaatcatgaagaaacattttggagatcaaagagcagatagatcgtatctgcaaaatacattttcttactttcaagggaagtacaattattcatcaggaaaggatgctttgacatttccgaatcaactcgatttcccatcatttggtcgtttgaaaatgtcagaaaaaagagacatgacattaagagatgttaaaaggttaaccttaaatcaaaagagagaaaaaataagttctttttcatcagttcataaactttcattgattgtactcaaatgtactcaactatatgagaccaattgtttgctaagttcattaacaaatcaacaaattcaagatattcatgattactttgaaactcaggacatttatgatacagacattgaattggaattaaaatcgagacatgaaaaagaaatagaagaagaagaagtagaggtagaagtgaacattgaagcagaggtaaaagaggatgacttagaagatcaagatgttgattcacaagatgttgaatactttgaacaaatggccattgaagaagaagaagagcctattgttattagacctgtgaatacagacaatagtattactggtgaagtgaataaactacttaaattaaatgaacaagctataccggaactactcaaatgtacagaccaagaaaaagttcaatatgaggtggctccttttttaggtaccggtgaactttccatttctgtttttgataagctatcgaagactctttttggtgggttatcttccaagtcaatttttggttggataagaagaaaatgggacacattggggactggcatcacttatcttgcatgttcctgtggatatacagcttatattcttgataaaaaagatttaactgattgtacaaatgctaagtgtgatattaaaaaaagaaggaaagtgaaaatgagatatgaaagtatcagaatctttcttgcattattgtatttagatgagaggattagaaaaggtatggaattaaatagagcaacacatttggaaaacaatgaaactttggacagcgttcttaacggcaacttatatcgtcggtcgatggaaaaggagaaagaacctaacacattttgtttcaatttgggattgtcaatggatgggtgtaacgttcattctaaaacaatgatgaatactgaagttgttgccatttcgattttagatttacctccacaacatttaaaagaaaaagaatttgcatttgttccaactttctttcaaaacagagcaagttctccaggctcaaacagagaattattaaagattttgatgactgatttaatggatttatggaatgaaggttttaaagttacattaaacggggttacgcatacaatatacgtcaacatcgtcacatttacaggggatattccctcaatagctgctagtttggagcttcaaagtcaaaaggctacatttccgtgttcattttgcaagattcaaaagattagtactaaatcgggggaacttccactttcatttaacaaccttgaaaataatccaatggttacttcagatgaacttagagatttggcacggagaaaagagtttcctactcaatctaatatatggaaattgaagggggataacatgtttactgtttttactggttttgattttatgcgttcagtatctccagatctgatgcatgttgttctagaaaacatgtttcccaaaaggatatgtgcatcgttgttggaaaagaatctttttaagagtttaaacaagaatttatttgaaaaattgaattggggggtcacttcaataaaaaattatcctaatagcaaagggatgtttgaagagcctagtaatttggacaagttttttacacaagaagcttccaaatcaagattgaaggcagttgattcaaaactgtttggacatgcttttcctttgatggctaaatgcaatttaggtatggataatatccattctgagatactgggtttacttgttgaaataaatcaacacttattatgttttatggctcaaggtgttccacgtgaagatgtgccactgctcaaggaaaattacataaaattgatgcaaagggttgaagaattgagcaagaagcacaaatttttgaatattatgttctgtcttccaactcattatgttatccacatgtttgaaaaatggtgtgatgttggttccttttttgacacttggtgttttataactgaaagggtttgcaaggaagtgaaaagtttgacacgcccagggcgtcacacaatgacaactctagggatcagacttccaattttgttgtataaaaatatgagatcaatttcgttaatgaaaatcgacaatatggattgttataatttcaaaattggagaaaaagtaaaagatcttagccaacttaaaactttgttaaatcaagcctcaaggaagtttggtatttcagataaaaatctaatttctgtttatgaacttgattatatctttattcgttcacttaaattgaagcttgatggctgccaaggctatgcaaaaattaagaacgggaaagagtggaggttcattaaggtaatgagaattcttaggtttaattatgaggataaaaatttacttgcaatcaaatttgcagacatggaaattattactccttggattccatgcattactccttcattagaaaaatgtctgcatcctgaaatcaaaaatgtttcaaagactacaagatggatgtggctggataatacagttgatatcacaccaatacgtgtcttaccagagcatgataaaatggtgcttgatgtcagacctcattatggaatgatgtttagaagaaaaccaagtgttccaactagttgatgggatacttgatgctctttattattttataattcttttcctttttctttttgtttataataacactctataattaactatttcttttatcaataatatatcatcttaacacagtgtaattactctcctatattaatataggccaatattaattaagcaggcacggctatagcataattttggaaattctcatgattttcgaggcatattcgctgagccttcttcagattattctctcacaaaaaagggccttttttactgtttttcagagctattttacatacacttagacatgcttaagcaacttaaaaataacatcattaaaatgtgcaaattaagaactttatgatagagcttttagagactaaaaaataagccatataagtaatacaaaaatggaattaaaaaatcccttttttggggtagatttcaaaaatcacttttttcttgatattgacattaactatacaaaaattatatcattgtaatctcctattcttcacgagcaagaatatacaatatgagctcttgaaaatgtgtagaagacacttataaatcgagttgaaaatggtccatttttcaggaattttcaaattttgaaaatttgttagcgtttttttttttttgttagtgaccaagggccaacggtgtatatatgatatgttacttttgtaattaattcaaatattggtactgatgcactttatagttataacatcaataaactgaactttaaacagttaattatttaatttcatttatgtacattgaattaccatttaatactaacaattaataattactataatcttatgattaataatgtaaataactctcttattggttaaaattactaaataaataataccttaattttatttaataaccttttttcaggtacttttatgcaatatctcatctttatctttaatttatattgatttattgttctttatttagaaataattatcgtaccaatactacattatattatatatattaacactatatataactaataatatataccctttataccattcataccccttaccccctttcatcccttcatatcaccataccataatgtcagtaattgattatttatttacatttgatattaacccaatttcaaggattaaaattttaaatactttaacaaaatttaatcttaatgatactgattcaattgatattcaattagataatttattagatatccttattccaattaatttatttaattatcctaatattgaacattatacatttataccaatttcaattaatatttcaaatggtaatttatctatcaatcataaagaagaattaaatatttgtacttgttatatttatacaattagttattatgataataatattaatattgcaaaaggtatttcaattatatctcaattaccattattaacaatatttaaaccatttttagtttatttattacatgattcatttaataataacatcaatctcaatacaatttatcataatttaaataattctaaaattgatactctattcaatcattttcaaaaaataaatttaccttcaagattcgtacttagtagaattcaacctgatacaaaattaaacgattcattaaagctaccatcccaattatatgatacattcattgatactgataatttatttaaaacttcaatcaacttaaatccaattaatttcccaattaatataccaaaattatcattaatttcatcaaatttatcattatttggtatagatttacaaaattcttcaaatttgaaaaatttcataaatttccttaataatattaatattaacattaatggttcaacatatatggaaacttcaataaccccttatgaaaatataaatccattaaatattttattaaatgctcttatattgaaaaaaaaaatcatattctttgcaaataaatcatgttataataatttaaatgattatattataatattataccttattttcaattcatcaaattctttactatccaatgatttaacattttatccaataattgatttaaataatttaaatttattaaattctcaaaaaaattatttaattggtacatcaaatcatcaaattataagtaaattagattggaatattttcttaaattttgattcaaatactcttaatgttcaatgtgatattgataataccaatataaatacattagatccttcaattaattcaaattattcatcatttttaatgacaccttcaacttctttttcaaatatttctaaaattgattcattaaaacctgatttaagattaaataattggaatccttcatgtttccctaaaattattaataattatacaattaaaaattcatctaatgttcaccacacaccaataacaacaaatttttcatcaattccaagaattgataattcattaattttacaaattaataaattaattaaaaataatcataatgatgaaactttatttattttaattacaaattatttacgtaatttaacaacaaagatattaccttcattttatcattttattaatttccttaaaataaatgagtttaaatcaattcctggaaatgataatgattatgaaattaaaaaatttattaaagaaaataatataattcaaccattcccacttaattacccatttaattcacagtttgcttatttaaatgattcaaaaattttaatttattatactaaaattgttttatcaaatttatcattattatcaacatcaattaattataattctaatattttccaaaacacaaattctaacattattcctggatttttattctcttggaatggaggttctgatgatgatgatgaaatttttattagattagatactcattatttaattagtatattagataaaatgattgatggtacatcaagtgaaagttggcaattaaataaattcttacttttacaaattttcaaaattttaaattcaattttaaaaattgatagaaatgaaattaatggattaaattattttttaattgatttatttattgaaaaaagaggtgatgaatcatttacaaaatcttatggaattaatttatttaaaagtaacaataattctaataataaatttttgaaaaaattaaatcaattatctatatcatcaacaaatttagaaattttaaaagatttaataaccaataatgataataatgaaaatgaaaatattaaatcaagaagaaattcaattattagtaataaatcagaaaataaatcaacaatttcaacagaattaaatgaaaatgatgaattattatcacatataagtacattaggttcacaaagatttattaaattaattttagtttcatcactttatttatcaattagaggaccagaagatttaattgaaacaaataaaggtattcgtaggaaagatttattattaacagaatttaaaagatttttaagtagtgttttaaatgataaattttttaaagaatttgtacttgttgaaatggatgattttgttaaattaacagttaatgattttattgattatcatatgtaattttttcatattatattatatattatattatctctatagaatcttatttattatacaaaaaagttaattaagttatactaatctaattttaattaattaccaaccattttatggaatctccatggaacatcaagtttatctaatgtaacttcaactaatcttggaactgataaatcattaccaaattcctctaatttataatctaattcttcaggtgtattaacaattgcagttttagaatctttacaaccaaaagtttggaaaatattagtccatttccaatttggtctaatatcattataatccctatttggacctttaataattctttcaactgtataaccattattatttaataaaataactaatggtttaataatattttctctattaaaattacttaattcttgaattgtcatttgagctgcaccatcaccttcaattaaaattaatcttgaatctaatttacccaattcagttaatgcaatactaacaccaaatgaacatggtaatgccataccaattgaaagataataatgttgtccaataactttagaatttgaaggtaatttaatatcaggtaatccaaacattaatgaacaagtttcagtaacaataacatcatttggtttaaaaaatgattgaaatttttctaacattttagtttgtgaaattggagtatttgaaggtatttgttcaattttattaataattttaggtatttgataaattggtaattgatttgatttatttaatgattcaatttttaataataaatttggtaaaatatcttcaaatgaaatattttggaaattttctaatgaaccaattttaatatattcaggatttaatttaataattgaattttcattaatattattatataaagtccaatgaccactattaatttcattataataatcaccaatatgaattaaacaatctgaattttgaacatatgttttaaccattttatttgattcatcaccattataatcaccaatataataaggatttgattcatctaataaagatttacccatatgagaattacatgaaggtaatttaactaaattaacaattttttgaacaatttcagttaaaccatatctatcagttaaaacatcacataaaataactggatttttagaattaattaatttatttaaaattttaattgaaatttcattaattaaattaatttcatcattagttgaaggtaaagatctttgaattaattttgaacctgaaatattaattaaatttgaaccatcaattaaattattaacaatatcacaaggaacatataaataacctggttttttagttaaaataatagttctaaataaatcatcaatttcatttgcagcatttgataaatcattagttaatgaaacaattttacatgaaacacttttagccatattttcataaacataatgatcagttggatctctagttgaaacagcattaatcatatgatgataatgattaccatttgatttagatgaataaggagttgtaccaattaaatgtaaaattggaacatgttcagcaaatgaaccacaaataccattaagagcactcatttcaccaacaccttgagttgttaataaaacaccaaatttatttgaaccaattgtacgtgaataaccatcagctgcataagaagaatttaattcattacaacaaccaacccaatttaaatttggaacagaatataaatgttcaagcattgaaaggttataatcacctggaacaccaaagatattatgaatatctaaagattcaattctacgaaagatatattcagaaattggaagagtatatgtagattttgtagtttcaatacttacaggagccatagtgtgtgtattattttgttattgtttagtaaagtgtaattaaaattgtagtaaatgaatagcagatatgaatagcagaaatggaaatcaagagcaaagaggatatacctttgatcttatatatacctttatcaactcttaatatctaaccgtaacagtgccttatatttcagtgtaaaaggcattttcggagaatccagtctatgccctcttcctctttccgaaatttcacattcgctatcttctcttaaacggttatcggttaatatcggtaagtatcggttagtgacggttttcttcttttatatcttcatatcttcatatcttgttcaatatcttcatagacgggtggtgcttcatctggttctatattattattattattattattattattatgagtatcgtccattcctaataagaaatctggcatagatttagtaatgaattcatatttccttctttgactatatccatcactaattgtccatgtaattataaaattaacaacattaccaaaccaattaggaacaaatcctgaacacataattgaattatctcccattatatccattaatgattgatttatatcaatatctgccttattggaaatttcttcaattggtaattcatattggaaaatttcattcattttattatattggaaatctttaatatccatatttaattccttgaaatttatcttaattatcctatttttactctgttctttcatataatattgattacattgtaatgaaaaactattatttgtctcaattaataatgattcaatttgaaaattacctaatttagtactttgtccattaaatacaaattctttacctttattatccattattccaatacttttcaaatcaacattaaattttaatgatatttgactactaaatggttcagataattcaattattgatctaatagaaaaatccatccctaatggtatacttttggtaaaattagaataattctcacttttataatcattattccaaagtttccttataaatttagttgatgaatgtgatttattaattgatgttggaattaatgcattagttgtttcatcataataaaattttttaagtttatccttgaaaatatcaattttaagataacttaatgtagtaattgtcttggataaatttggatcaactcctgattgccatccaattggtactttataaagtaaatatcttttcggtttattctttaatcctccaaatctataaatttcaacaaatatctcatatgtaacagttatatcaccatcaatattaccaaaatttttacatgaacttggtaaaaataaacaatctgggaatttaaattcaaaattataattaatcttctccccctcttcaaatgtaaatgatggtgttgtaccattattattattattattaccaccattttctttctcattacaacaatctttacaatcaagaggcaaatcattatgaatattataaaaattaatactttgagtaattagttgtctattaattgcagtactttgaaatgctccatattgtaaatcggttgcataatataatatatcagctgtacctgcaataccacatctaatatgactaacttttttcaatgtttcaataaaattaatgaatactttacccttaatatttggataaattggtgaatatttataattaacaggtggatcagtaatatcaacaaatatctctgcctgtttcccaaaccacttactcatttattcaattgactatatagatagatacttatagaaagaaaacaaaggaaaaagaagatatacaaacaaacaaacaaacaaacaaacaaacaaacaaacaattatcaacgattaataatgtcgaatcttttatcaacaaggctgagtcggccaccccacgaattttctcccagccttttcttatcagttgatatatagacattattcattatgatttctctttgatatcgtagtaagggccttcactctcttcatatgatggtggaggtggtggaaatgattgtgatgagtactcaaattccttttccatggcctttttctcagaaacttcttgtaaactatcccttgatttaggattataattatgatacatatcagggagatcaaatgttgaatttgtttccaaatgataaattctcatattaccatcattaataccatcacttattgtccaattaaatgaaactgttgttttattttcaaaaatatttgtaattccatttgtcattacaactttaccacccattaaatcaaataatgaatattttaaatttaattttgaatgttttaataaatcattacttgaaatatttaatttgtaaatatcatttgatttatcatatatgaaatctttaatatctaaataaaattcattaaattgtatattcaataacggcgtatatactgtatcattaattttcccatcaattaatatttgatttttttgttctaattgtaatgattttattttaaataatccaagttttgtacttttattattaaattggaaatcatttgtttgattattatacatcatttgagttttcaaatctgatgataaagtcaaagtaaattgattaataaatggtttggtaatatcaattatttcattacttttcatacttacacttaatggaattgattttgtaaataaatcataacgattagcattttctctttttctgaagaataaactattcttttttgcaattgaagttagtttacctgtttcttcagaaaaataatattctctttcctttttgtcaaataattgtgaatcagatgtagttaaaacatttttattgttctcatctcttaatctatcatctatacccgcttgataaaataatggaattacacatctatcataaatatattcaattccattcctaaattgaacaacattaactctaacttcatgaattactgaaactagtgcagtctccatattaccataattaagacatgaacttggtaaaaagttacctatactgttaacattatcattaaaatcaatgaaaaaagaaaaacataaattattatcccttgaattaaatttatttggtaaaacatcatcaagattcatccttttattctttacataaataacagattccttttgtatacgattctttgatttaacacccattctttctataatttcaaaataacaaatttgtactgtagtaacaattgaataatcaagaaattgaatataatcagctggttgattgaaaatcatacgtaaagtacctgaaactctattatgcattggtgaatatttcttaaaatttggtggatttgaatatgttatttcatagtcaacttttgtcattgtgtagttgtcgttgtgttataaagttaaggtagatgacattcgtgtggcggatcatgggtggtatttataaagaattggaataagaaagtaccgaaagataagtggctatagagatgatttaataaataataaattaatagaacatgtgcgtttcggtaattccccaagagggtaatcccttagataagctaagccttctaatgttgatcattttcattatacattttcattatacattttcattatttagtcattcatttatttataaattgcaaatactgtgtttcactctcttcgtaggaaggtggtggtagcataacctcttcagtttcatctcccacacgtgtttccatttcaggtgaatatctctcagtatttggattgttttgataagttacattttcattatattgtgaagaattattaatcattttaaataaatcatcgattttattaaatatttgtttctttgcttcttccacttcttcattattaattggatttttaccaggtgtgacagttttagttatttgttcaatgaaaggttgaatattttgaagttctttatttgataaatttgttgtaaagttgctgatattagttgtagttgtgtttgttgtagtagtagtatttgctgtacttgtggctgtggttgtggttgttttggttttggttttattctttgtttttggtttattctttgaggttttatttaatgatgaaatggtttcccatgatttagtagatgaattggatagtttcctttcaagtttttccttttcaacaatttcttcctttaattctgcccttttagtttgataatctaatgggaagttaaatgttgataatgtattaatattataatttataacagttgattcattatttgcatcacaaatactccaattaaatgttaaacttgaaatattaccaaaccatgcaggtgtaaatccagttgttaatatagttttagaatataataaatctaataatgaagttttcaaattaatttcacaatgttttaataatttatcattatcaatattcataaaataatattttttctttttatcatattggaaatctttaatatcaaagaataattccttgaatggtatattcataattggtgtatatattgtatctttaacaattaaattatcatattgaattgtaattttatttctaacttctaatgttaatgaaagtattttaaataatccaagttttgtactttgatcattaaattggaattcctttgatttattattattagtatcaaaattttttaaatcagaaactagttttaaattaaattgttcaataaatgatttagacatatcatgttcaggttttgtttccacttcaatagataatggaactgaccttgttggtgattcatatccatttgacttagaactacttttgctgaatatactattctttctcttagaaatgggtattaaagatttattttcacttgaataatacaatgctttttctttttcttgaaagagatcagattttgagaaaattgaataatcatgtttatcctttatatttgtttcaatattataatctaaacgtgattgataaatcaatggtatcttacatttacttaaaactttctctgttgataaaaatcctgattttttttgaattatttcaactttaatatcataataaattgaaaattcccccttatttttattaccaattttagaacatgaacttggtaaaaacatatcatttgggaattcatgttcgaattgaattttcaacttttgatcagtataatatgaataagttttagttttcggattaaattgaaattgtaaatatttatctaaatcagccttctttgttttaacataaaaggggaaattttgtgaaattaatgatttatgtggtttaagtgaatcaggtacatttttattcttaattaaatgagttgaaaaataagttatttcagctgtaccaactaatgaataattaattgatttaataaatttaacagtatctttaaattctatatttattgtacctgaaactttattattagctggtgaatatttaaaattatttggtggatttgaaagagttatattgtatttaattgaacttgtgaacattgtctgtggagattgatatataatctaattatgattaatgaaacgacaataaagaggatataagatcaaataaataagatatacaaaaagaaggatatacaaaaagaaggatatacaaaaaggaacatgcaattaagttatagtcactgattcattacaatcatcaatttgatcaacaactcaagacaacaaataaagacatgtgcacaataaataataattaaagacaataaggtaccgcgtaacgtcattaatttaagagcgagggtggaaagaacattccttattgggtaatagtgaagataagattgtttattcactgtacattggtggtggtgcattatcattataactctctcctaacatcctcttattcattaaaaatccaggggtggagaatgtttcaaatctataatcatatgtcttacccataccatcatcaattgttaatttaaatgataatgttgaagtaccataatttaattctaaaaatctatcatctggacaacataaagtttcatctgagaattgatataatggtttattaatatctgtatctgtatgattacttaacatttcacttgttaaatcaaatttataattacctttagtatcttctgtaaaatcacaaatatcaaaatttaaattgttaaaatcaatttttgataatacaaaagttccagatactaaaactaataatcctttatctgtgataatctttgttttataatttaatctaattttcaacttcttaatttcaaaatatcctaatttagtactttgtccatttaatttaaattctacgctatcatttgaattaaaaccattttctaataaattagaactaattgaaatttgtatttgatttacaaatgatgttttcaaatctaaaatttttggaattgcaaatgatacagttaatggaattgtactcattgaatccgttaaattattagttttatatctatcatcccataattgtctaagatttttagttttcaaatgtggattatttattgatgtaggtattaaagcttttgacctttcatcataactaaattttttaattttatttttaattaaaatattattatgatattctaaaattttaatgtcattaagttcagtaaaattaacgcctgattgaaattgtataggttttctataagatgcataagttttagaattatcatgagaaccttgcctttcaattttaaaatcaagatcataatgtgctaatatatcaccataatcatcatcatcaaaacaacatactgttgaaggtaatactttattttggggaaattcaacttgaaatttacaatcaattttttcacctgaattaaatgaatattcattatttgatgattttttatttggtatttcaagatttaaattaatttcaaataaatgatatctatcgaatactttggttttagatattttttcatttactttagtctttggatcaattttataaaatgcatcatatctaatataaattctaccactaaaaattaataaaattttattaattcttttaacattttccttaaattttaaatgtaaaattccattaataattggatttattactgaatatctattatgtggtggggcatctaataattcaacatcaaatacaactgatttaccaaacagtggcatttttgattaagaagaatataaaatggaaataactaatcaatcagattgaaattgtgattaactattttgatatatatattaatataatacatcaagcacttcgcaggaggagggaccaattatatgatttctcaaaaatgaaaacaccacttaattaacaagaagggatattattcaattttgaaaactttaatgtcattaatatataatatgttttcgtagacattaatgccatgtggtacatattattagatagtcagattttagccataataggcaataatggcagtacccgagatgcgattatgttctgtttaataattttcagaatatgcgagaaaagggcacttttctcaaaatgtttttttcaaaatgaattggggtattgaggggatgtgaagtgtgttatttttgctgtttcttttattatattgataaaatgatagtattgtagtacatatctagtgttttcaatggttttggaagcttttaactgtgattgttttcattagtttggaaaaatctttgttttaattggtgattttaaaaaaaatttacactgtacaaaaatttgtaaaattcattaaaaacgaagatacgttttccagcaatttaataattttaatctatagccaaaaatcataattatggtttcgtaattttaaaccacacaattaacaagcagaattagtaataaattccttaaaataaaaacagtcacgtgcacagacaattacgaggatgtcaacacctttaaacgaacataacaacccctctgtagctcagttggaagagcgcgagactgtaataggcttaaacagcatacaagacatcttgaggtcgctggttcgatcccggccggagggagcgtattatatttttttccttctttaagttggtaaatttttttattaaagattattgacatgaatttttcagtaggttaaaaaatttttttttttattaaagattattatttctgaaaaatattttttctttctatagacactaggaacaatccattacctttgatatatacaatggaaggggctagattgaatttagcatctttgaaagataaagttaccaatgcattagttggtaaggatgaaaaaaaacagaaaaagcaagataaaaagaattcaaagaatgataaaaaatctaaatctaaaggtaaagaacaatctgtaaataatgaaattttacgtcgtgaagcattagaattaggtgcaactgatgaagatttaaaacttgttgaagaatcaaatgctgatgatgatgaacttagtgaacaagaatttgatgatgataataataataatattaaaattgattcaaaattaactaatgaattaactgattttatgaaagaaattggtttaaaaggtcatactgttaaagatgttgaaattgaagatgatgaagttacacctgaattagtttctgaagaagaagaagaggaggaagaggaagatgaggatgatgaggaagaagctgaagaagaagaagcagcagaagaatccgaggaagaggtagaatcatctgaatctgaagaagaaactgcgagcaattccaaagaagaagaaacaaaagttaaatccaaaaatccagacaagattgtaaatttacaaacagttatctctgatagacttactgttcaaccaagaaatgattggtataatattccattaaatttagaaaatattacacctgatagatatttaaaacaacaagatattgatgaattatatgaaaaggctaaaagattaattgaagaagataataaaatttatgatgaagaatttaataaatcatcatcacaaaaacgattcctttcacaaattttaacaggtggtacattatcagataaaatttctgcattaacattattagttcaagaagctccattacataatttaagagcattagataatttatttaatatgtgtcaaaaaaagtcaagaactgctgcaatgcaatgtgttgatgcattaacagatttattagttagtacaattttaccaagtgatagaaaattaaaatcttttaagaaacaaccattaagtaaaaatttatcaaatgaacaattaattttaatgtattttgaagatcatttaaaatcattatattttaattttattacaatgttagaaaaattatcacatgattcaattttatatgttagaatgaaaattgtttcacatatattctcattattaaaggcaaaacctgaacaagaagcaaatttattaagattaggtgttaataaattaggtgatattgataataaagtttcatctaaaacatcatatcaaattttattattagaacaagaacatcctgcaatgaaacaaattatttgtgaaagtgtaattgatattgttttcagatcaaataatgaacatcatgcattatattattcaattaatacattaaatcaaacaattttaacaaataaggatgaaaaattagcaaataaattagttgatgcatattttgcattatttgaaaaattattaattaaaactgataatgaaaatattggtaaatttaaggaaactgaacatcaaaaggaaggtagaagaaagcaaaaagttaaaagaggtaaaaaaggtggtaaaagtgttaaaaatgagaaagatgaaaatgatattgttgaagagaaaaatagtaaaatgtttgcagcaattttaacaggattaaatcgtgctttcccattctctaatttcccaatggatatatttgaaaatcatttgaatattctttataaaataactcatagtttaaattttaatacatcagttcaagcattaattttaattcaaacaattacaaataaattttcagataatttacataaggatagattttttagaacattatatgaatcattatgggatgaaagattattaaattcctctaaacaaggtatttatttaaatttattatataaatcattaaaggatgatgataattcttcaagagttttagcatttgttaagagaatatcacaagtttgtcttaattggcttaatattggtacaatttcaggtatgattttccttttaattcaattagagagagaaattccagaaattagaaatttatttattaatacaccaatggatgaagaattattgaaaaaaattgaacaagaggaatcacttgatgaaattaaagaaaaggagaattctaataaagtttatgattctaaaaagagagatccaaaatttgctaatgcagataaatcatcaatttgggaaattcaatattttattaatcattatcatccaactgttagatcatatgcagaaaattttatgaaatttgatgaaatgagtaaaaatgaaaagaaattaattaccaaacctgatttaggattatatacattatcacatttccttgatagatttgtttataagaaagctaaaagtaaggcaaatttaaaaggttcatcaattatgcaaccattaggtggtttacatacaggtaatttattagttcgtgcaactggtattgaaaatactgatataccagccaatacagaggattggctatctaaaaaggcaaatcaaattaaacctgaagatgaatttttctatcaatattttagtacaaaacaagataaattaatgcgttcaaaatttgataaagaaatgaatgaaagagcaaagagaggtgaagatgaagatgaggatagtgaattagatgatgatacagtttggaatgcattagttgcgagtaatcctgatgttgaaggtgatgaagataattatgatgatgatttatctgatttaagtatgtctgatatatctgatgatgaagaagatgagggagatgaagaagttattgaagatgttgaagatgatggagatgaagatgatgagggtagtgaagctgattcagaggaagaatctgatgaagatggacctgttaaattaagaacacttgaaggtatggatgaagaatttaactccgaggaagaagaagttgaagaaaaacctaagactaagaaggaaaagaaatctaaatctaaatccaaatccaagactgataataatggtgaattatcatcagatggagaggatgttaaagtattaatggaagatgatgaatctgatgtttacggcagtgaagaatccgaatatgaaaaagagaacgataaaaagagaaagaatgacgataacggtagtaaaaacaagagagttaagttctcatcattaccaacctttgcctcagcagaggactatgcggaatacctccaatcatcctctgatgaagagtaaataaagtaagtaaagtgtataaagatagaaatagataacccaaagtgacgtaataaagtgcggaattagctggttcctgaaatagtaataatttgggataaaactgttggtacctgacgagaatttaatttagggtcgggggcattggtttttcctatcttttctggcttggccctgttgatttctttttattaatattatctttctttcttttgccaatgagtgttaataactcctctcactcaccctttgatgagtttgtaacagacagtccagttattaaacgtcgtaaaacttctaaatggccaattgaagttgaaaatgcctttgaggaagctgcttcaattataccaaaacaatcaattaaaaatattacaatttgtggttcaaaacatggtaggagtagatatatattattctatatttattataaaactggttcaattagaaatataggtcaaataacttctcatattcaagcaattactaaaaataataaagatgatagtaataataataacaataacaacaataacaataacaaagataatagttctaataatgatatactaaatttaatgttaaatggtcctggggagactgaagaaatatgtgaaaattttactaatatatttactaaaattgttaaatcattaccacctaaattattatctggagactttaaaaatcttgaaactaaaaatcaaatggaaaatcaaaggaaggaaataaataaattaattaataataataataatgataatgtcattatgaatactaatcaaccaccaattagggttaatattaagaaatttgaaatggtttatataaattttaaattaattgatgattctcatatgttttcaacattatcaccaccaagtttattatttgatgaaataaatgaaatttcaattgataaagatttattgaatgctaaatatcctgaaacttataaattattaattaaagagaaaaatggtctagataatttaaataatttaaagattccaataattcatgcaaaatcttcaatgtttttaccaccaataacaaaaaatttattaaatggttattataatttttcaattaaattaagttttaatgaattaatgaaagaggataataaatatggtatattgacaattataacatcaaagaaagttttaattcaagaaaatttcgaaattttaaattcttcaattagtaaaaataaaaagaatgaattaattataaattctaaaattggtacaaattattggaaaaattatctttcaacaaagaggagggaaatgatttataatggtaatgatcctcaattaattaaacttcaagaaaaatcaattgaattagagattcaacctttaaaaattcaacaatttataatatattgtggtgaaaataattataatgatggtaataatattaatattgataatttaaatttaaatgatgttagatgtatacttatttggagatttaataaagttgataatcaatcacaagcaattacaacatttacgaaaattaattcaataattgataaagataaagaaaaagatgaagataaaaatgaaagtataattggagaaagtatgaataagagtaatagtttattttcattaaatgatcgaatatcatatgaaaatattataacaccaccaactacaaagagaagttcagtacctattgatcaatatagttcgaataatcaatatttaaataattattataatggtaattcatattataataattattattatactgatagaaattattcaatgccaataataaatagtgttaattttattaataatgatcatattaataataacatcaatgataatgaaataataaataataataatgatattataactaataatgaattattaccaactaatataacacttataaataataattatagtacaaatcatttaaaggatgtatcaccaataactaaatatttccaaattgatgataaattacttgatagtgaagataatattaatataaataatgaagaggatagttatttacttggtaagaaaagatatgggtataaaatgtaaataacgataaagtacatgaataaattcaatattttgaccaaattgattttgttgatgaatcaattaattcaattgaattatttattttatctaaatcattaagaatctctaatttacgttgttccattaatttaaaaccttcactttcattaatattaaaccaagttaccatttccatttccttttgataatcatcatcattattattatcaatattatcttcaatattagaattattatttgtttcattgctttctttattatctttagtttcttcatcattttctttactttcctttgtagaatttttagaatttttagaatttttagaatttatatcattatcaaccttttctggattatcattacctttactatcatcattaataaatttttcattaaaattattccaaatattataaaattcatcaaatgaattatcagttaatttaaccatctcaattaataaacctaattgtgaaattttcaaattttctaaattttcaacatatttatttgaaaaaaaatttaaattttgaagtttggaaacttcatcaattatttgtgattccttatattcaatttcatcatttttacaattttgccatgtagttttcaatttatcaccaattttattattaaattgtttattattaagatttttataactttcattatcatcatcaatacctacattacttacaagatcttgattatattcgtcgtcatcatctgtagatgtttcatcatctgaataataatcattattatcatctaatgcatttatatcattaattgaataattatcattaatatttgaatcatttgtagttgtacgtctcttaattgattgtaaatttgaactttgatatgtatttatatgatttattggagggttagttatattattgttattaacaacagcttggtcagcggttattgttgtattgaatggatttgaatatgatgaatttattgaatcatttattgataaattatttgaaattaaatcatcactatctaatgcctctaaatcaatatttgaactttcatcactattattgttgtcccttactgaatatacactcatttgtaaaaagaaagtagtgagggagggatggatggataaattaattagattaattttagagattaaaatattatttatgataatgaaaagaaattacatgtagtaaaaatagatacttaaatataaaatatataagaagttaattaattaaattaaattaagtatagttaatttattcttggttaagtaaagcatctctcttttcagctaatcttgcagctcttctttctcttgcagctttatttctaattcttcttgcttcagcttcttcctttaatgctttttctcttaaagcttcagcctttgcttgaataacatgttcaactaaagctcttttatgtttaaaactattacccttagcagatttatataaagcatggtataaatgtctatcaattttaccagctgctctatatttagctaacaatcttcttaaaactcttaatcttctcatccataaaacttgagttgacattcttgcattagcggtaccttttcttttaccataacccatatgtctaccacctctctttgattcagctaaagctcttgcatgagatcttgaatgaacagttgttggttttttaacaattgaaccattcttgtataattttctaattgaagctcttgaatttgcttgagcaagttcagttgtctcagctggatctaaccagatttttctttcaccacaacctaaaactgatgcagcaagtcttttttgtaaacggaggttagccctgtaatagatagataaataaagtatgttagtattttgtattctaatatagaattctttgtcatatcatattatatcaaaatacatacattgtagtgtattatttgaatagttttaatagaaaagtgtattatttaaagtgattattaattaataattagaaaaaatttctctctatgatttttttttcaactaatttttttaaataaataaataagtggctaatttggaattttcaacttgtagagtgtatgatatgattgatattatatgatatgacgatagttatagtattatacgtacatctttgaatacttgttgtgctagaaagtaagtaaaaataggtaataattataaaattaaaactataatatagaataaaaatcaataaaatcagtaatattataatattgagataatttgatagtaagacctaagggtggaggaaaatattttaatggaggaaaattactgtggcagtgggggagcgtacagaggggattggtgggggatagtgatggggaaaatttctcactttttttttcttaatttattgtgactgtttattagtaaattgtttctttatttttttttcatttcctttcctctattacgtaataagcaacaccctgcgcaccgcgtgtagccctttttaatagcacgtgtgctgcacgtgacagggttattataagaattttttttagtaatattatttatttaggaaaaaaaattttttttcactttatttaagattaagatacttcattagtttcatttacatttgagtaatccacacaacttatcacaatggcacattcattaagatctaaatccaaaaaagttacaaagaaagctaaatgttttaatccaaattcagattattttaaagctgctcaagagagaactttaagattagctgaaaagcaaaaggaaaatttattgaagcaagaacaattaaataaagaaaataaagatgaaagtaatagtacaagtactactactaatccattagatattccagttgaagaattagttaaagttaaaactcatggttggagaaattctagagcttcaaattataaaaagaaagttgcttcaaagaagaagaataagacaatgaaattttaatcttaatcctagtcttaattatattataactattttagaacattacttttttgctacgctttgtataatgtatagtcattatatatcaattttaatctattatattatcttattatattattatcttattatcaatatgatatactctctactatacttacgtaatcactatcattattaattagatactacagtaaagtactgtaaaggatagatgatactatcactatactatactaatactatcatacaatacaatacagaatataaagataataactattaaaaccaagccactcatataccattatagcaactattgtaataataatccattaactccatatattaaacaatagagtttttcctttttttgatgagcatgtcctgattacacttttattaaattattccttctttatcagttgtttcttctatttcttcatttactaaactcaattacattcattcaacactataattgtagttatacacatatacaactcataatcattcactttttatttatcttaaattattcaatcacttcaattactatacatttaccccatatttttcccacattttaaattatccgtcaataatcaatttttgcccacttcattaaaatgactaaaattgtacttttacgtttagatgatactggtaaaccattgatttctaatatttcgggtggtgttttaactttccccgcttgtccacctgatcaaaatattaatgataataataataataatcaaccattatttactttaagattttatatagtttcaggttcaaaaatttgtaataatggtaaaatttggacaaatgttgttaaaaattataatgataaatttcaaagagataaattccattcaattgatatcgaaagttctgtttataaagatgtaatggttgatatcgatatttataaaccaggttcttattcttattatattacttataatagtttaattaatatatttgatgataataatattaatgaaattaatgaaattaattcaaatgaaatttgtgttaaatcattggaatatcattttgttgtacctccttcacttttcattaataataaatatttaacctttaattcaattacaatgcaatcagttatttcaaaatgggttggtaatgattttaatgaaaattggttaccacttttcgaaaatattaaaaataaaggttataatatgattcattttactcctttacaaaaacgtggtgaatcaaattctccttattcaattttcgatcaattacaatttgatgatgaaatcttctcaaatggtgaatcagatattaaatttatgactgatttattagaagaaaaatatggtattttatcaatgactgatattgtatataatcatacagctaataattcacaatggattattgatcatcccgatgttggttataatcaaaaaactgctcctcatttaatttctgcaatggaattagatgctttattattaaaatttagttgtaatatgaaagaattagattatccaactataattaataatattgatgatttaaataaaattattgatggtattaaaattcatgtcttgggtgaattaaaattatgggaattttatattgttgatattaataatcatttatctaaattaaatgatgtttggcataataaaattgaaaaatgttttactaaaattgatataccttatgaaattattaataatttaccaaaattatcaaattttataattgataattgtaaattaaaagattttaatatcttagatgttagattttcaaatagtttaaatattttaaaatttgcaaatattttggcaaatatttatggtttaaattcaaattttaatgatataatttattataatgctcaaaaaattttagatgaaattaatttatcattatatcgtacttataatattgataatgattcaattataactcaattgtttaatagaattaattatcttagattagattcaaatggtccaaaattaggtgaaattaatccttatagtccattaactgaaccttattttacaagatttaaagattctaatggtgaaaattgggctttagctaataatggttggatttggggtgcaaatccattggttgattttgcatcaaatcaatcaaaatcttatcttcgtagagaagttattgtttggggtgattgtgttaaattacgttatggttcaaattataatgattcaccttatctttgggatagaatgtttgaatatactaaattaatggcaaaattatttcatggttttagaattgataattgtcattcaactccaattcatgttggtgttgcaatgttagatgctgcaagatcagttaatccaaatttatatgttgttgcagaattatttagtggttctgaagaattagatattttatatgttgaaaaattaggtatttcatcattaattagagaagcaatgcaagcaaattctgttagtgaattatcaagattatgtcataaacatggaggtagaccaattggttcatttaaatggttaccattagatttaattgcatatcctgctcatccattagaatttgaaaaaagatgttcagaagatatgaaatgtaaatctgaaattccaattcctcaattagttacatcacaggaacctcatgcattatttatggattgtactcatgacaatgaaactccaaatcaaaagagaacaattgaagatactttaccaactgctgcattagtttcattttgttcatgtgcaaatggtacaacaatgggatttgatgaatgttatccaaatttattaaatgttgttactgaaaaaaataaatatatttatggattaaatttaggtatttcaaaagttaaaaaattattaagtgatattagacatgaaattgctaatcaaagtattgaagatattgaacgtaatgaaatgtatgttcatcatgaaaatgaatttataacaattcatagaattaatgcacaaacaggtttaggttatttattaattgcacgtactaaattttatcaagatggtgatcaaagtttaaaaccaattgttttacatggtgttaatgcaaaacatcaattttcttatgcattaattaataaatcaaatgaagataataataataatgataatattgatgatggatttattcatccaatggaaacggaattgaaaactttagatccaattaattgtaattttgatagtgatgaaagatcaacaactatttcaataccagattattttcctcaaggttcaattgcagttgttcaaacacaaattattggatgtgatgaagaattagatgaatttgttagaactggtgcaattgaagctgcaaaagatttatcattagttgatttaaattgtattttatatagatgtgaatctgaggaaagagatgcaactaatggtgaatctggtgtttatacaatacctaatcatggatcattggtttatgcaggtattcaaggttggatatcagttttaagagatataattgataaaaatgatttatcacatccattatcagatcatcttagaaatggtaaatgggcattagattatgttacaaatagattaattccttatgaaaatgatgataattcaattaaagttttcagaatttggcttgaaacaagatttaataagattaaagatataccaaatttccttattccaagatattttgcattaattattggtgttgcatatgaagcattaagatttactgcattaagtaaaatgactaaatcaattcaaaattcaactgttttcattcaaacattagcaatggtttcaattcaaatgattggtaaaatgaataatgcatcaattcatccatttaagaaaatcccatcaatggcagctggattaccacattttagttacgattttatgagatgttggggtagagatgtatttatttcaagtagaggattattattatcaactggtagatatgatactgcaaaagatcatatattatgttttggtaaaacattaaaacatggattaataccaaatttattaggatcaggtaaggaaccaagatataatgcaagggatgcagtttggttttatttacaatttattcaagattatattacattagtacctaatggatcaaatattttaaaagaaaaagttaaaaggagattttcattagatgatacatatttcccatttgatgatgaaagagcatttaaagttgaaagttcaattgaagatataatttatgaaattttaagtaggcatgcaaaaggtattaaatttagagaggcaaatgcaggtgaaaagattgattcacaaatgagagatgaaggatttaatattgaaattaaagttgattgggaaacaggtattttatttggaggtaatcaatggaattgtggtacatggatggataagatgggagaatcaactaaggcaggtaataagggatacccaggtacaccaagggatggtgcaccaattgaaattattggattactgaaaagttgtttaagatttgttattgaattaaatgagaaaggattatttaaatatgattcagttattaatcaaaatggtgataagattacatttaaggaatgggataatttattaatggagaattttgagaaatgtttttatataccaattaattcagatgatgattccaaatatgaaattaattcaagtattgttcatagaagaggaatttataaagatgtctataaatcaactaaagaatatgaagattatcaattaagaggtaatttcccaattgcatataatgcagcaccagaattatttgttcaagaacatgcattacatgcaattcaaatgactgataagatattaagaggtccagttggtttacgtacattagatccaggagatttagaatataaaccatattatcataatggaattgataatgaagattttgcaacatcaaagggtagaaattatcatcaaggacctgaatgggtttggatttatggatattttcttagagcatatgctaaattacattttagtgaaattgatagatgtaatattgatagatgtacaccaagttcatatttacaacaattaatttgggttagattaattgaacataaaaaatggattcatgaaagtgaatgggcaggattaactgaattaactaataaagatggaattatttgtcaagattcaagtccaacacaggcatggagtgcatcatgtttacttgatgtttatttagatgcctggacagaatacaatttgtaatattttgattaaaaaatagatagatgtatagctttgttaataactaattttattatattaggggatactaaaatgccctttttgtaattatattagcatatttgtatgtatgttttgtttctttctttttgttttgttttgttttgtttcgttttgttttgtattcttttgtttatcagagaagaacatacgtagttgctagatagattaaacatattgtatttattaggatgaagttttgtaaaataattagtaaaattgtaacaattttaagtatttgtgaaattcaattagttttatcaaatcctattataattgaggaacaacaagttgcaattccacatgatagtcttaatagtagtgaaaatattttaaatattcaagatgatttcccagtttatgaaaactttcaatatattacagaggagaaaacagtttatgttacattaaatccaacaacaattttcgttacaattactgaaactgttgtaccaactaatacaattgtaattactgaaactaagaaagaatttgtagttccaacatcagtaccaatttctaattcaacatcaattgaagaaattattagttctgttattattattgaaactaaaactgatattacaacttcattaacaactgaatatgttaaagcaactaatattttaacacctcctttattatcattaccaataagtaatacaactatatcatctacatcaatctcaatttcaattccaattgtaacatcatcatcaattttagaagttataccgggagcaggtgaacttgatatgattttaggtgatcgtaagaatttctttgaaacttctaaatcttttaaaccaacaatactttcaacatcaattgtaccatcaccaattaaatcatcagtttcaataccatcttcaacaaatgtaattatttcagatacaacaaccccaattaatgatttaacaattacaaattctaataatgtgtttgatccattttctaatgttattacaacatcaacaacaccatcaagtacagcagttaattattcaacatcacaaagttattatactaaaacactttataataataatggtagtagtaatggtaatggaacaaatactaatggtaataatatgacaggattggaacaacttttagagaattttagtccatatactgatcttccagcagcagattatgaattatccaatgatggtaaccgtgttaaagttacaggattcattggagcaattgtttgttgtatcttaggatatgttatataataagtaaaagtagaagtataagtaaagttatttagaaatgtattttgaaatgtaattaatgaatgtgtaatactacctgtaagtatgagacacagacggcatacaggccagtaatcatccaactacagcagattccatgaagatacagtacagaagagaatgaagcagtgaaagttaacttaactgaggagatgcaaaattaaagtacgcaacgaccacagggtttgtatggttactataggcatttcttttgcttttggaatacaatacaatataccagtgcaagttccactactatggttgaggttaagagaactgttagaattactacatcacaacatgtgttaaaggatattccagctgttcaagaaggtttcccaatgagggaatggagtattcaagtttcattagttaatgataaaggattggaagtacctgcaacaatatttgataaagttacatattcactccatccaacatttgcaaatcctgtaaggtcatttaagaaacctccatttacaattcaagaacaaggttggggtggatttgatattccaattactttaacattaattgataaaggtggtgataaaaaattaaatcatgaccttaatttttataaagagaaatatgttattgataaacaaatttcaattaatacgacgaaaccaaatttattaaaagaattagcaaaatctggtcctgtaccaatgttaaatgatgaaaataataatggtatcaataataatagtagtattaataataataatactttaaataataatactggtattaataatggtacagataatttaaatggtaatacatcaagtattggtgataaacgcaaaaataatagtgttacaacaaatgcaaatgaaccaaaaaatattaaaagatcaaaaaatgctgcaaataaaggtggtgttgatttagagaaaatggctgaacttttagttaaattaaaggaagatgatttattaggtgtagtacaaatgattaatgataatagaacacctgaaatgaatattaaaaatgatgttgataatggtgaatttactatggatctgtttaccttacctgatactttattgaaaagtttatgggattatattaagaaaagagttgattaaactttttccttttcaaattcatttactttaataatatacttttatactttaaaatttatacatataattatataattaattaactatttactatatataattaatacattttacaatatcttcatcaaacagaccaaattttaatagtttcatccctacttgcagttgcaatacctaaaccatcagatgatactttaactttactaacaattccattatgaccatttaatgaaccaacaatttcacccgttattgtatcccaaatgaaaacacttgtagattctgcatatgatgtaaacattaatctaccacttttagaaaaatctaatgataaaactccaggattatcaattgatgcttgcatattactcattaatgatctaacagatgttgacctttgatcttgattaatatcaaaagttgaattttgatcattattattgttactgtaattattatatgttggtattgtattttgtaaattatttgaattaatatattttcgaactttatcaattgtataagttgataattcaccatcacatcgtatatcaaacattttaattgtaccatcatcacaaccacatgtaaaacaattaccatcggggaaaaattcaatttcacttgaatcaaatttagaattaactaaatattttctacttgctaatggatctcttatatcccataacattgataatttatctgatgatgaagttacaaataaatttggatttgaattatttaaatcatttttattaatacttaatgataaaacatcacctaaatgtccataaaaatgacgtatataaccaccttttgatgtatcccataatatacaacttttatctcctgatgatgttattaattgtgttgaagatttatgtaaaaatgataaatctgaaatatattctttatgatctcgtaaaattgataataaacctgtattattattgttattattattattattatcatcattatcaatacttgtacttaatttataaacaatacaagtattatctaaaccaccagttgcaactaattgtccattataactaacatcacatcccattatataaggatcatctaattcaactaaattattttttaaacctttaacagcatcccaaactaataaataaccatcttgtgatgatgtaactaaatgttgattatcaggataccatgcacaacttgaaactttatcaaaatgaccttttaaagttttataattatttaatttatattttgtttcattatttgataaaatattcttttgacaattatttgacattgattttaatgttgcatcttgattctcttgtttaattttctttaattgtaatgttaattgatgtgatgcattttgtgcaatattaacattattattaagtgttttagataattcaaattgcttttgtaatgcagtttctatattcattattattttcttatatgcttatgaattaaattgaaaaaacgaatgtatttatataatatatatggtagttaatgaatgtaagaatatatttcaattatagagaaatatgtataaaactaacaaataaacaactaatcaatcaaccaaaccaatatagaatatacaaattataagagaaataaaatgaaatgaaatgaagttagaattcaatatacaaaatacagcctcccatataatattaaattactaattaattattattattattattattatattgttattatcatcatactacgtccatccagcagacaatagacgctcacttaaaagaaacatgaaacaacatgaaacagaatcaaaaacaacatgaaacaacaattcattcagttcatgctatgcacagccttctttgattacatcacacccaaagatctaactcttcaattgaataattatcagttaattttgaatcaactgtatcatcaattggtcctaaaactggtcctaattgtttaaatgatggataatatggtaccattgatgaacaacttgcaatataaatattattataaattttccaataagtttctctaactttccttgaaggatgaaataaacctgaccaaatatattttaaaattatattacaaccaagtacaatatttaaacattcaattgattccataatttgtaaaataacatgaggtgaagtttcaaaaatatttggccaaattaaattaaggaaattaataaatgcattttcataaccttgacaataactacctaatgcaatatttttgataacatttgcactaatttgtctatgaactaaatctctatcagttaatgaatctaataataatggagttaattgcataaatataatctgatcccatttctccaatatattcaaacataaatgataatgcctttaaaacaccattttgaacatttttatcaggatatctaaattcattcattaaaattggtaaaattgtaaatggtttacaattttctgcaattataccaattgcaacagctgttgaaattcttaattgacgttcttgaacttttaaattatttaataacataacaattaaatctgatggtccaataattttagaaattaatccaaatgttttatttgcacttttcctaatatttttcctatatgcttttaacatttctaataattcaaatgaaattcttaaccattctttattatttataaaatttttacccctaattgcaatatcaccaattaatggaattgtcatttcttgaactttttcattcctattctttaaaattggtgttaatgttgataaaatttgtccaattgaaggattcaactgattcaatattatcaattttattaataactttccttaatgcatttaaaattgaacctaaaacatcaggataaacttcacctaatgattcatataatattgtacataatctaattaattgattatcttcattacaaatttttaaaacatcaacaatttgaacaattaaatcagctgattgttctctaatttctggatctttattctttaatctaaataaaattgaactaataattttctttaaatgaattttagatctaacacctaaattattcattatattaccaaatgaatttaatataattaaatttgaaattttattatttttttcactattaatttgattttgattttgtaaacaatataataaaccatcaattaatctattaatagttttatcatctaaatcaaatgcaccaaatgatgttaaaactttatcacatgcctctaatgtcattttcctaaaaggttctgaatcatcctttaaaaatggtaaaattttaataattgtctctaatgaaccaattttcaatgataatgaataacatgcattaattgttaaattaacaatttttttatctaatgcagttcttctaatccaaaaatttttaaaaaaagtatttgataaatctgaattttcaattatatttccctgtaaattgtttaatttacaaattttttcaattgaaattaaaattgattttttaatttcatcatcattaatattattatttgattctcttttaattattttaaataattcaaatgaataaaaatttaaatcatcattattatcaattaatggtattaaattaccaaaagctttaataaaatatgataatggtttacctctatgatttcttaaacctttaaataatggattaattataatttggaaagattcataaccaaatggataacaagcttcaattaatgaagatatagttgaagctgtaattgttctaacatttagaatttcatcattaagatttttagaaataattaatataagttcattaataaaaggtctaattgaatgtttcattaaaattgaaatttgttgaataatttttgtacctgtaaatctaattagataatttttccttgaattacaaacaatttttaaaaatggtaataaatttttaataccaaaagtatttgctaaaattgcaaaagttttagaaattaaatttctagttaattcatcattatttgataaatcttttttcaaaatattaatcattgtatataaaccaacaattttagataattttgaaattaattcattaccttcagatcttgtaaatttattttcatcatttaataaaggcatagtaacagttaaaatattatttgtaaaaggtttaattaatgatgaatcaaatttaaacattatattaacaattaatttaattaataaatgtctactttgttcatctaattgttcatcacttaataatggtaaaattatattaaaaattatattaggaccaaatttaattgcattttcagttaaatttttcattgcaggtttccttgataaatttgaaccatttttaatttttaatataagtttcatacatttaatctctaattgttcatcttgtgataatttttcaatatctgaattatttttcaatattgttaatttatagaaaattttagaatctaaatcagtaaaatattgtaaatcctttaaatctgataatttaggtatttcaactatattattatttttattattattattaatattgttttcattattatcattatttagtaaaattccattagagtttgtattaaatgatgaaatatcaggtggtgtcataccgttagtactcctaggtattgatataattttaaatccatcaggtaatatactatctaaaaattcatcagttaatgcaataccattaataattgggaattgttcaacttctgccttacgtttcctattctttcgtatacgatctttatctgctcttggaggtgttttatccctatcattacttactactgatatttcaattgatcttgatctacctctatctttatctttatttaatctattttgaataaattcggtatttttattgattttatcatcattaatgtttccaactgtttcaaatgaaggtacctcatcgacaatatcccttgaaatggtgtattgtttactcaactgatgtttatccatccccatatttgccatccagacctggtaatacagtatatacctttcctttactaagataaatttttcgtggcttaaatttttatagcatgagtttctatatttatatcttgtttctattttcatttctatactgttctttcttctttcttctttcctttctttattcccttggtaacaacgtaaagatgcaaataaaggcttggttattgacttctctctttgttctcactcaaatagttaacgctgatgatgttgccgatgctgcagttgctgccgctgatgcagctcaaggaataaatactacaccaacaacagttttaactacagttccaactacaacagcagctgctgttaatgctgttacaactgctaatactaatacccttatagatactgatacaaatactgatactattgatacaaatactattgcaacaccaacagatgttacaactgctacacctgttacagcaactactccaactacagcaactactccaactacagcaactactccaactacagctacccctgttacaccaactacatcaagttcatcatcaaccacaatcgctgatactgatactgatactttatcaagttcttcaacaagctcctcatcaagctcctcatcaagctcctcatcaagctcctcagcaagttcttcagcatctgctgacccgattaatccaaatcttgtaagtgattcaattgttggtacatggtcatcaaaagcaaatactgttttcacaggaccatcatttttcgatccaattgatgaattattaattgaacctgcattacctggaatttcatattctttcacagaagatggattttgggaagaagcaatttatcaagtttcaccaaatgctaaaaatcattcatgtccaacagcaattttaatttttcaacatggtacatggattaaaaatgatgatggttcattaactttaacaccatttgaaattgatggtagacaattattatcacaaccttgtaatgatagtggaatttcaatgtattcaagatataatcaaactgaaaaatttaaaacttatcaagtttatgttgatccatatcatggtaaatggagattagatttacataaaagtaatggagaaattatgcaaccattatatttagcttatcaaccacctcaaatgttaccaacaagtacaatgaatcctgctgcaactgaaactgttggttctaaacttaagaaaagagatttaaatcaatatggatctgaattaagtttatctgatagaattaaacgttcattagagaatagttataaaactaatgcagttatgaaagatagtattaattattcattatggtggtggacaagtgcatcaatgatgattattggtgcaattatttttgtagtttcttaagtataagtttgtataaggttgtttttctaattaaaaaaaaataaatattattaacttaatttaataaagaattatatataagaaagagtaagaaaaaaacaagaacaaacagcaaagtttagaatattaataattgcttagcaatgtaaagaagattttaattaatttttaatttcataaaatcttctaaatttatcatcaatttcagttaaatagaatgaaccatttggaatataatcaattgaacctgatggtttaaaagatttttgtaaatgagctttctctcttaaagcaattgcatcttcatattgttgaggagttttcaattctctattaattaaacgttctttaacatttaattttgatgtaatatttgaaatatcaccattaactttaactgataacattgttgaagctaaacctgaaccataagagaataaaccaattcttttattttgtaattcatcattaccaacaattgataataatgagcataatgaaccccaaactgaacctgtatacatattaccaacattagttggtaattctaatgaaggtttaacatttttattaaatttttcctttgataatggcataaaagttttttcaacagttttatcaattaatgtagtttcataatctaaattaataaatttacttgaatctaattcaggtaaaatatttggattattaatataatcattatataataatcttgcataagattttgcaactaatttacaagttggtacatggaaagcattataatcgaaaaaatcaataccaacagtattattttcagatttacttaaaccttttgaaattgcctttttagaataagatttataacaataatcaactgctttaacataacaagataatgaaaaatgaccatcaacaactggatattcacttgtaaaatttggcttgtagaaatcatatgcatgttccatataagaacctctaattggatcaaaaacaattggagcatttggaccaattaaaatagcaacagtacctgcaccaccagttggtctagcagaacctttttcataaattgcaatatcaccacaaacaacaattgcatctctaccatcccaagaatcagattgagc

(The sequence listing continues in the following parts.)

1. A beverage composition comprising fermented cascara or fermented cascara extract wherein the weight ratio of 2-phenylethyl acetate to benzaldehyde is greater than 1.

2. The beverage composition of claim 1 wherein the weight ratio of isopentyl acetate to benzaldehyde is greater than 1.

3. The beverage composition of claim 1 wherein the weight ratio of isobutyl acetate to benzaldehyde is greater than 0.5.

4. The beverage composition of claim 1 wherein the weight ratio of isopentyl acetate to 3-methylbutanol is greater than 0.5.

5. The beverage composition of claim 1 wherein the weight ratio of isopentyl acetate to hexyl acetate is greater than 10.

6. The beverage composition of claim 1 wherein the beverage composition is selected from the group consisting of a ready to drink beverage, a beverage concentrate, a soluble beverage powder, dried aromatic plant material and combinations of these.

7. A container for use in a beverage preparation device, the container containing the beverage composition comprising fermented cascara or fermented cascara extract wherein the weight ratio of 2-phenylethyl acetate to benzaldehyde is greater than 1.

8. (canceled)

9. A method of preparing a beverage composition comprising;
a. steeping cascara in water to form an aqueous cascara extract and steeped cascara;
b. fermenting the aqueous cascara extract in the presence or absence of the steeped cascara; and
wherein the fermentation is performed by yeast in the absence of acetic acid bacteria.

10. The method of claim 9 wherein the yeast comprises Pichia kluyveri.

11. The method of claim 9 wherein the yeast comprises a genetic sequence having a global nucleotide identity of at least 98% to the combination of SEQ IDs NO:1-12.

12. The method of claim 9 wherein the fermentation is performed in the absence of Saccharomyces cerevisiae.

13. The method of claim 9 comprising separating the aqueous cascara extract from the steeped cascara after fermentation.

14. The method of claim 9 wherein the steeped cascara, present during the fermentation of the aqueous cascara extract, is dried together with the aqueous cascara extract after fermentation.

15. (canceled)
